(19) United States
(12) Patent Application Publication
(10) Pub. No.: US 2025/0049955 A1
(43) Pub. Date: Feb. 13, 2025

(54) COMPOSITONS AND METHODS FOR THE TREATMENT OF NEUROLOGICAL DISORDERS RELATED TO GLUCOSYLCERAMIDASE BETA DEFICIENCY

(71) Applicant: VOYAGER THERAPEUTICS, INC., Lexington, MA (US)

(72) Inventors: Mathieu Emmanuel NONNENMACHER, Lexington, MA (US); Matthew Alan CHILD, Lexington, MA (US); Jinzhao HOU, Lexington, MA (US); Jiangyu LI, Lexington, MA (US); Shaoyong LI, Hopkinton, MA (US); Tyler Christopher MOYER, Lexington, MA (US); Wei WANG, Arlington, MA (US); Giridhar MURLIDHARAN, Malden, MA (US); Kelly BALES, Lincoln, MA (US); Jeffrey BROWN, Medway, MA (US); Elisabeth KNOLL, Lexington, MA (US); Smita JAGTAP, Melrose, MA (US); Yanqun SHU, Winchester, MA (US); Adewale ADELUYI, Lexington, MA (US); Brett HOFFMAN, Lexington, MA (US); Nilesh Navalkishor PANDE, Lexington, MA (US); Jeffrey Scott THOMPSON, Lexington, MA (US)

(21) Appl. No.: 18/711,069

(22) PCT Filed: Nov. 16, 2022
(86) PCT No.: PCT/US2022/079964

§ 371 Date: May 16, 2024

Related U.S. Application Data
(60) Provisional application No. 63/280,480, filed on Nov. 17, 2021.

(51) Int. Cl. A61K 48/00; A61K 38/50; C12N 15/86

(52) U.S. Cl. CPC A61K 48/0058; A61K 38/50; C12N 15/86; C12Y 302/01045; C12N 2750/14122; C12N 2750/14143

(57) ABSTRACT

The disclosure relates to compositions and methods for altering, e.g., enhancing, the expression of GCase proteins, whether in vitro and/or in vivo. Such compositions include delivery of an adeno-associated viral (AAV) particle. The compositions and methods of the present disclosure are useful in the treatment of subjects diagnosed with, or suspected of having Parkinson Disease or related condition resulting from a deficiency in the quantity and/or function of GBA gene product or associated with decreased expression or protein levels of GCase protein.

### RELATED APPLICATIONS

[0001] This application claims priority to U.S. Provisional Application No. 63/280,480 filed on Nov. 17, 2021; the entire contents of which are hereby incorporated by reference in their entirety.

### SEQUENCE LISTING

[0002] The present application is being filed along with a Sequence Listing in electronic format. The Sequence Listing file, entitled V2071-4005PCT.xml, was created on Nov. 15, 2022, and is 4,635,958 bytes in size. The information in electronic format of the Sequence Listing is incorporated herein by reference in its entirety.

### FIELD OF THE DISCLOSURE

[0003] Described herein are compositions and methods relating to polynucleotides, e.g. polynucleotides encoding glucosylceramidase beta (GBA) proteins and peptides for use in the treatment of Parkinson Disease (PD) and related disorders, including Gaucher Disease, and Dementia with Lewy Bodies (collectively, “GBA-related disorders”). In some embodiments, compositions may be delivered in an adeno-associated viral (AAV) vector. In other embodiments, compositions described herein, may be used to treat a subject in need thereof, such as a human subject diagnosed with GBA-related disorders or other condition resulting from a deficiency in the quantity and/or function of GBA protein.

### BACKGROUND

[0004] Lysosomal acid glucosylceramidase, commonly called glucosylcerebrosidase or GCase, a D-glucosyl-N-acylsphingosine glucohydrolase, is a lysosomal membrane protein important in glycolipid metabolism. The enzyme is encoded by glucosylceramidase beta (GBA) gene (Ensembl Gene ID No. ENSG00000177628). This enzyme, together with Saposin A and Saposin C, catalyzes the hydrolysis of glucosylceramide to ceramide and glucose. See Vaccaro, Anna Maria, et al. Journal of Biological Chemistry 272.27 (1997): 16862-16867, the contents of which are incorporated herein by reference in their entirety.

[0005] Mutations in GBA are known to cause disease in human subjects. Homozygous or compound heterozygous GBA mutations lead to Gaucher disease (“GD”). See Sardi, S. Pablo, Jesse M. Cedarbaum, and Patrik Brundin. Movement Disorders 33.5 (2018): 684-696, the contents of which are herein incorporated by reference in their entirety. Gaucher disease is one of the most prevalent lysosomal storage disorders, with an estimated standardized birth incidence in the general population of between 0.4 to 5.8 individuals per 100,000. Heterozygous GBA mutations can lead to PD. Indeed, GBA mutations occur in 7-10% of total PD patients, making GBA mutations the most important genetic risk factor of PD. PD-GBA patients have reduced levels of lysosomal enzyme beta-glucocerebrosidase (GCase), which results in increased accumulations of glycosphingolipid glucosylceramide (GluCer), which in turn is correlated with exacerbated α-Synuclein aggregation and concomitant neurological symptoms. Gaucher disease and PD, as well as other lysosomal storage disorders including Lewy body diseases such as Dementia with Lewy Bodies, and related diseases, in some cases, share common etiology in the GBA gene. See Sidransky, E. and Lopez, G. Lancet Neurol. 2012 November; 11(11): 986-998, the contents of which are incorporated by reference in their entirety. Limited treatment options exist for such diseases.

[0006] Consequently, there remains a long felt-need to develop pharmaceutical compositions and methods for the treatment of PD and other GBA-related disorders and to ameliorate deficiencies of GCase protein in patients afflicted with GBA-related disorders.

### SUMMARY

[0007] The present disclosure addresses these challenges by providing AAV-based compositions and methods for treating GCase deficiency in patients. Disclosed herein are compositions and methods directed to AAV-based gene delivery of GCase to ameliorate loss-of-function and to improve intracellular lipid trafficking. The compositions and methods are useful to improve lysosomal glycolipid metabolism, and to slow, halt, or reverse neurodegenerative and other symptoms of PD and GBA-related disorders (e.g., dementia with Lewy Bodies (DLB), Gaucher disease (GD)) in a subject (e.g., a subject having a mutation in a GBA gene). A β-glucocerebrosidase (GBA) protein is also sometimes referred to as a GCase protein herein.

[0008] Accordingly, in one aspect, the present disclosure provides an isolated, e.g., recombinant, nucleic acid comprising a transgene encoding a GBA protein, wherein the nucleotide sequence encoding the GBA protein comprises a nucleotide sequence, e.g., a codon optimized nucleotide sequence, at least 88% (e.g., at least 89, 90, 92, 95, 96, 97, 98, or 99%) identical to the nucleotide sequence of SEQ ID NO: 1773. In some embodiments, the nucleic acid further encodes an enhancement element, e.g., an enhancement element described herein.

[0009] In one aspect, provided herein is an isolated, e.g., recombinant, AAV particle comprising an AAV capsid variant and a nucleic acid comprising a transgene encoding a GBA protein, wherein the AAV capsid variant (i) is enriched 5- to 400-fold in the brain (e.g., a brain region of an NHP) compared to SEQ ID NO: 138; (ii) transduces a brain region (e.g., dentate nucleus, cerebellar cortex, cerebral cortex, brain stem, hippocampus, thalamus and putamen), wherein, e.g., the level of transduction is at least 5- to 10,000-fold greater as compared to a reference sequence of SEQ ID NO: 138; (iii) delivers an increased level of a payload to a brain region (e.g., frontal cortex, sensory cortex, motor cortex, putamen, thalamus, cerebellar cortex, dentate nucleus, caudate, and/or hippocampus), wherein, e.g., the level of the payload is increased by at least 500- to 10,00-fold; (iv) delivers an increased level of a payload to a spinal cord region (e.g., cervical, thoracic, and/or lumbar region), wherein, e.g., the level of the payload is increased by at least 10- to 900-fold, as compared to a reference sequence of SEQ ID NO: 138; and/or (v) delivers an increased level of viral genomes to a brain region (frontal cortex, sensory cortex, motor cortex, putamen, thalamus, cerebellar cortex, dentate nucleus, caudate, and/or hippocampus), wherein, e.g., the level of viral genomes is increased by at least 5- to 50-fold as compared to a reference sequence of SEQ ID NO: 138. In some embodiments, the level of payload is measured using qRT-PCR or RT-ddPCR.

[0010] In another aspect, provided herein is an isolated, e.g., recombinant, AAV particle comprising an AAV capsid variant and a nucleic acid comprising a transgene encoding a GBA protein, wherein the AAV capsid variant comprises (a) the amino acid sequence of any of SEQ ID NO: 3648-3659, (b) an amino acid sequence comprising at least 5, 6, 7, 8, or 9 consecutive amino acids from the amino acid sequence of any of SEQ ID NO: 3648-3659, (c) an amino acid sequence comprising at least one, two, or three but no more than four modifications, e.g., substitutions, (e.g., conservative substitutions), insertions, or deletions, relative to the amino acid sequence of any of 3648-3659, or (d) an amino acid sequence comprising at least one, two, or three but no more than four different amino acids relative to the amino acid sequence of any of 3648-3659. In some embodiments, the capsid variant comprises the amino acid sequence of SEQ ID NO: 138, or an amino acid sequence with at least 95% sequence identity thereto.

[0011] In another aspect, provided herein is an isolated, e.g., recombinant, AAV particle comprising an AAV capsid variant and a nucleic acid comprising a transgene encoding a GBA protein, wherein the AAV capsid variant comprises: (i) the amino acid sequence of PLNGAVHLY (SEQ ID NO: 3648); (ii) an amino acid sequence comprising at least 5, 6, 7, 8, or 9 consecutive amino acids from the amino acid sequence of PLNGAVHLY (SEQ ID NO: 3648); (iii) an amino acid sequence comprising at least one, two, or three but no more than four modifications, e.g., substitutions (e.g., conservative substitutions), insertions, or deletions, relative to the amino acid sequence of PLNGAVHLY (SEQ ID NO: 3648); or (iv) an amino acid sequence comprising at least one, two, or three but no more than four different amino acids relative to the amino acid sequence of PLNGAVHLY (SEQ ID NO: 3648). In some embodiments, the capsid variant comprises the amino acid sequence of SEQ ID NO: 138, or an amino acid sequence with at least 95% sequence identity thereto.

[0012] In yet another aspect, provided herein is an isolated, e.g., recombinant, AAV particle comprising an AAV capsid variant and a nucleic acid comprising a transgene encoding a GBA protein, wherein the AAV capsid variant comprises an amino sequence comprising the following formula: [N1]-[N2], wherein: (i) [N1] comprises X1, X2, X3, X4, and X5, wherein: (a) position X1 is: P, Q, A, H, K, L, R, S, or T; (b) position X2 is: L, I, V, H, or R; (c) position X3 is: N, D, I, K, or Y; (d) position X4 is: G, A, C, R, or S; and (e) position X5 is: A, S, T, G, C, D, N, Q, V, or Y; and (ii) [N2] comprises the amino acid sequence of VHLY (SEQ ID NO: 4680), VHIY (SEQ ID NO: 4681), VHVY (SEQ ID NO: 4682), or VHHY (SEQ ID NO: 4683); and/or an amino acid modification, e.g., a conservative substitution, of any of the aforesaid amino acids in (i) and/or (ii).

[0013] In yet another aspect, provided herein is an isolated, e.g., recombinant, AAV particle comprising an AAV capsid variant and a nucleic acid comprising a transgene encoding a GBA protein, wherein the AAV capsid variant comprises one, two, three, four, or all of: (i) an [N1], wherein [N1] is or comprises: PLNGA (SEQ ID NO: 3679), SLNGA (SEQ ID NO: 4684), QLNGA (SEQ ID NO: 4685), ALNGA (SEQ ID NO: 4686), PLNGS (SEQ ID NO: 4687), PVNGA (SEQ ID NO: 4688), PLNGG (SEQ ID NO: 4689), PLNGT (SEQ ID NO: 4690), PLDGA (SEQ ID NO: 4691), QLNGS (SEQ ID NO: 4692), PLNGN (SEQ ID NO: 4693), SLDGA (SEQ ID NO: 4694), HLNGA (SEQ ID NO: 4695), ALNGT (SEQ ID NO: 46%), PINGA (SEQ ID NO: 4697), ALDGA (SEQ ID NO: 4698), PLNCA (SEQ ID NO: 4699), PLNGQ (SEQ ID NO: 4700), PLDSA (SEQ ID NO: 4701), RLDGA (SEQ ID NO: 4702), QLNGN (SEQ ID NO: 4703), PLNGY (SEQ ID NO: 4704), PLDSS (SEQ ID NO: 4705), PLNGC (SEQ ID NO: 4706), PLYGA (SEQ ID NO: 4707), TLNGA (SEQ ID NO: 4708), PVDGA (SEQ ID NO: 4709), PLKGA (SEQ ID NO: 4710), PLNGD (SEQ ID NO: 4711), KLDGA (SEQ ID NO: 4712), PHNGA (SEQ ID NO: 4713), PLNGV (SEQ ID NO: 4714), PLNAA (SEQ ID NO: 4715), QLNGY (SEQ ID NO: 4716), PLDGS (SEQ ID NO: 4717), LLNGA (SEQ ID NO: 4718), PLNRA (SEQ ID NO: 4719), PLIGA (SEQ ID NO: 4720), PRNGA (SEQ ID NO: 4721), or ALNGS (SEQ ID NO: 4722); (ii) an [N2] wherein [N2] is or comprises: VHLY (SEQ ID NO: 4680), VHVY (SEQ ID NO: 4682), VPLY (SEQ ID NO: 4723), VNLY (SEQ ID NO: 4724), VHRY (SEQ ID NO: 4725), VHIY (SEQ ID NO: 4681), VHHY (SEQ ID NO: 4683), FHLY (SEQ ID NO: 4726), LHLY (SEQ ID NO: 4727), DHLY (SEQ ID NO: 4728), VQLY (SEQ ID NO: 4729), IHLY (SEQ ID NO: 4730), VDLY (SEQ ID NO: 4731), AHLY (SEQ ID NO: 4732), VLLY (SEQ ID NO: 4733), GHLY (SEQ ID NO: 4734), VRLY (SEQ ID NO: 4735), or VYLY (SEQ ID NO: 4736); (iii) an [N3] wherein [N3] is or comprises: AQAQ (SEQ ID NO: 4737), SQAQ (SEQ ID NO: 4738), AQPQ (SEQ ID NO: 4739), AQSQ (SEQ ID NO: 4740), AKAQ (SEQ ID NO: 4741), AHAQ (SEQ ID NO: 4742), AQAP (SEQ ID NO: 4743), DQAQ (SEQ ID NO: 4744), APAQ (SEQ ID NO: 4745), AQAK (SEQ ID NO: 4746), AQAH (SEQ ID NO: 4747), AQEQ (SEQ ID NO: 4748), ALAQ (SEQ ID NO: 4749), ARAQ (SEQ ID NO: 4750), or TQAQ (SEQ ID NO: 4751); (iv) an [N4] wherein [N4] is or comprises: TGW, TGL, TGS, TGG, TAW, TGR, TAS, LSS, TSS, SSL, SSS, TLS, TVS, VSS, TSP, VSP, TMS, LSP, VAS, TAL, US, TLP, VLP, RGW, LSG, LAS, SSP, LLP, STS, TSA, UP, SAL, LGS, VTP, VSA, IGW, TGF, LTP, TLA, LSA, TVG, TAP, TMP, TSL, VQS, SSM, SLP, VSQ, RSS, TST, VMS, UA, TQP, LST, LAP, TVA, RLS, TGY, TSG, TAG, VMP, TSQ, TMA, VGS, TSW, TGV, TGT, TLG, LMP, VQP, TGM, SMS, SQL, IGS, RSV, TAA, STP, LSQ, TAQ, TGP, ASP, VSG, SAP, TLQ, LQP, TAT, TGQ, ATS, IGG, VAA, TSM, TVW, TAM, TGA, VAT, QSP, TQA, VQA, RSP, LAT, VAQ, LAA, RST, RTL, LGT, LMS, LGP, RTS, SQP, VLG, SVS, TMQ, SAV, LAG, SGP, TNS, RLT, TTQ, SAA, TSV, RLG, RAS, STQ, CSP, SAG, ALP, VTS, ISP, SVG, LTS, TTT, RSG, TQL, LNP, TVQ, IAS, LAQ, LSR, LSN, UG, TSN, SMA, TKS, SVA, TQQ, VQQ, RLP, SAM, TAV, TQW, SSR, TQT, VNS, RSA, LMG, RQS, LVG, VTA, RU, SMG, VMA, TKP, SAQ, NSP, ATP, VAG, RGS, VKP, RMS, NLP, NAL, RTP, RQL, VQG, VTG, VST, NAS, RVE, ATG, AMS, RNS, VMQ, SMQ, LQQ, TMG, LGQ, TSH, AAP, RSQ, TYS, ITP, VAK, TQM, TKA, SQQ, ISG, VSR, RTA, RML, SQM, VAN, CTP, ISS, AGP, TAK, RTG, LHP, TMT, AQP, QAP, RQP, LKS, NTT, TSK, RYS, KSS, NTP, VGG, IAA, LMA, MAP, VHP, VLS, LAN, ATQ, TNA, TAN, VSN, AAA, AVG, LTA, SAN, RAG, RQG, TLR, LSH, SAF, RAA, IQP, ILG, VNG, SVQ, LSK, TNG, RTQ, TMN, RGG, TTR, VRP, VKA, LAR, NQP, TMK, TYA, TQK, UK, IAG, TQN, LAH, NTQ, RQQ, RAQ, TKQ, TQH, TNQ, LMQ, VNA, VQT, TQR, VGK, VKQ, IQS, LQR, TMM, VGN, RIG, SAK, RIA, VQN, NVQ, RIP, NAQ, NMQ, TPS, LTN, VTK, PGW, LPP, SPP, TPA, TGC, VPP, TPT, TPW, TPP, RPP, TPQ, TPR, TPG, VPA, VPQ, RPG, KGW, TRW, TAR, IPP, RSL, LVP, KGS, VAP, KGG, KAW, PGS, TRL, or AGW; and/or (v) an [N5] wherein [N5] is or comprises: VQN, VKN, VQT, VQK, DQN, VQH, GQN, VQI, VHN, FQN, LQN, VLN, VRN, VQS, VQY, AQN, VEN, VQD, VPN, IQN, VKK, DKN, VKT, VQP, EQN, GQT, FQK, GHN, or VPH; and/or wherein the AAV capsid variant comprises an amino acid modification, e.g., a conservative substitution, of any of the aforesaid amino acids in (i)-(v).

[0014] In yet another aspect, provided herein is an isolated, e.g., recombinant, AAV particle comprising an AAV capsid variant and a nucleic acid comprising a transgene encoding a GBA protein, wherein the AAV capsid variant comprises one, two, three, four, or all of: (i) an [N1], wherein [N1] is or comprises: PLNGA (SEQ ID NO: 3679), SLNGA (SEQ ID NO: 4684), QLNGA (SEQ ID NO: 4685), ALNGA (SEQ ID NO: 4686), PLNGS (SEQ ID NO: 4687), PVNGA (SEQ ID NO: 4688), PLNGG (SEQ ID NO: 4689), PLNGT (SEQ ID NO: 4690), PLDGA (SEQ ID NO: 4691), QLNGS (SEQ ID NO: 4692), PLNGN (SEQ ID NO: 4693), SLDGA (SEQ ID NO: 4694), HLNGA (SEQ ID NO: 4695), ALNGT (SEQ ID NO: 46%), PINGA (SEQ ID NO: 4697), ALDGA (SEQ ID NO: 4698), PLNCA (SEQ ID NO: 4699), PLNGQ (SEQ ID NO: 4700), PLDSA (SEQ ID NO: 4701), RLDGA (SEQ ID NO: 4702), QLNGN (SEQ ID NO: 4703), PLNGY (SEQ ID NO: 4704), or PLDSS (SEQ ID NO: 4705); (ii) an [N2] wherein [N2] is or comprises: VHLY (SEQ ID NO: 4680) or VHVY (SEQ ID NO: 4682); (iii) an [N3] wherein [N3] is or comprises: AQAQ (SEQ ID NO: 4737), SQAQ (SEQ ID NO: 4738), AQPQ (SEQ ID NO: 4739), or AQSQ (SEQ ID NO: 4740); (iv) an [N4] wherein [N4] is or comprises: TGW, TGL, TGS, TGG, TAW, TGR, TAS, LSS, TSS, SSL, SSS, TLS, TVS, VSS, TSP, VSP, TMS, LSP, VAS, TAL, TTS, TLP, VLP, RGW, LSG, LAS, SSP, LLP, STS, TSA, UP, SAL, LGS, VTP, VSA, IGW, TGF, LTP, TLA, LSA, TVG, TAP, TMP, TSL, VQS, SSM, SLP, VSQ, RSS, TST, VMS, UA, TQP, LST, LAP, TVA, RLS, TGY, TSG, TAG, VMP, TSQ, TMA, VGS, TSW, TGV, TGT, TLG, LMP, VQP, TGM, SMS, SQL, IGS, RSV, TAA, STP, LSQ, TAQ, TGP, ASP, VSG, SAP, TLQ, LQP, TAT, TGQ, ATS, IGG, VAA, TSM, TVW, TAM, TGA, VAT, QSP, TQA, VQA, RSP, LAT, VAQ, LAA, RST, RTL, LGT, LMS, LGP, RTS, SQP, VLG, SVS, TMQ, SAV, LAG, SGP, TNS, RLT, UQ, SAA, TSV, RLG, RAS, STQ, CSP, SAG, ALP, VTS, ISP, SVG, LTS, TTT, RSG, TQL, LNP, TVQ, IAS, LAQ, LSR, LSN, UG, TSN, SMA, TKS, SVA, TQQ, VQQ, RLP, SAM, TAV, TQW, SSR, TQT, VNS, RSA, LMG, RQS, LVG, VTA, RU, SMG, VMA, TKP, SAQ, NSP, ATP, VAG, RGS, VKP, RMS, NLP, NAL, RTP, RQL, VQG, VTG, VST, NAS, RVE, ATG, AMS, RNS, VMQ, SMQ, LQQ, TMG, LGQ, TSH, AAP, RSQ, TYS, ITP, VAK, TQM, TKA, SQQ, ISG, VSR, RTA, RML, SQM, VAN, CTP, ISS, AGP, TAK, RTG, LHP, TMT, AQP, QAP, RQP, LKS, NTT, TSK, RYS, KSS, NTP, VGG, IAA, LMA, MAP, VHP, VLS, LAN, ATQ, TNA, TAN, VSN, AAA, AVG, LTA, SAN, RAG, RQG, TLR, LSH, SAF, RAA, IQP, ILG, VNG, SVQ, LSK, TNG, RTQ, TMN, RGG, TR, VRP, VKA, LAR, NQP, TMK, TYA, TQK, TTK, IAG, TQN, LAH, NTQ, RQQ, RAQ, TKQ, TQH, TNQ, LMQ, VNA, VQT, TQR, VGK, VKQ, IQS, LQR, TMM, VGN, RIG, SAK, RIA, VQN, NVQ, RIP, NAQ, NMQ, TPS, LTN, VTK, PGW, LPP, SPP, TPA, or TGC; and/or (v) an [N5] wherein [N5] is or comprises: VQN, VKN, VQT, VQK, DQN, VQH, GQN, VQI, VHN, FQN, LQN, VLN, VRN, VQS, VQY, AQN, VEN, VQD; and/or wherein the AAV capsid variant comprises an amino acid modification, e.g., a conservative substitution, of any of the aforesaid amino acids in (i)-(v).

[0015] In yet another aspect, provided herein is an isolated, e.g., recombinant, AAV particle comprising an AAV capsid variant and a nucleic acid comprising a transgene encoding a GBA protein, wherein the AAV capsid variant comprises [A][B], wherein [A] comprises the amino acid sequence of PLNGA (SEQ ID NO: 3679), and [B] comprises X1, X2, X3, X4, wherein: (i) X1 is: V, I, L, A, F, D, or G; (ii) X2 is: H, N, Q, P, D, L, R, or Y; (iii) X3 is: L, H, I, R, or V; and (iv) X4 is Y; and/or wherein the AAV capsid variant comprises an amino acid modification, e.g., a conservative substitution, of any of the aforesaid amino acids in (i)-(iv). In some embodiments, the AAV capsid variant further comprises one, two, or all of an amino acid other than T at position 593 (e.g., a V, S, L, R, I, A, N, C, Q, M, P, or K), an amino acid other than G at position 594 (e.g., T, M, A, K, S, Q, V, I, R, N, P, L, H, or Y), and/or an amino acid other than W at position 595 (e.g., K, Q, S, P, C, A, G, N, T, R, V, M, H, L, E, F, or Y), relative to a reference sequence numbered according to the amino acid sequence of SEQ ID NO: 138.

[0016] In yet another embodiment, provided herein is an isolated, e.g., recombinant, AAV particle comprising an AAV capsid variant and a nucleic acid comprising a transgene encoding a GBA protein, wherein the AAV capsid variant comprises PLNGAVHLY (SEQ ID NO: 3648) and optionally wherein the AAV capsid variant further comprises one, two, or all of an amino acid other than T at position 593 (e.g., A, L, R, V, C, I, K, M, N, P, Q, S), an amino acid other than G at position 594 (e.g., M, S, A, Q, V, T, L, P, H, K, N, I, Y, or R), and/or an amino acid other than W at position 595 (e.g., S, P, T, A, G, L, Q, H, N, R, K, V, E, F, M, C, or Y), relative to a reference sequence numbered according to the amino acid sequence of SEQ ID NO: 138.

[0017] In yet another embodiment, provided herein is an isolated, e.g., recombinant, AAV particle comprising an AAV capsid variant and a nucleic acid comprising a transgene encoding a GBA protein, wherein the AAV capsid variant comprises an amino sequence comprising the amino acid sequence of PLNGAVHLY (SEQ ID NO: 3648); and which further comprises one, two, three, or all of: (i) the amino acid at position 593, relative to a reference sequence numbered according to the amino acid sequence of SEQ ID NO: 138, is: T, A, L, R, V, C, I, K, M, N, P, Q, or S; (ii) the amino acid at position 594, relative to a reference sequence numbered according to the amino acid sequence of SEQ ID NO: 138, is: G, M, S, A, Q, V, T, L, P, H, K, N, I, Y, or R; and/or (iii) the amino acid at position 595, relative to a reference sequence numbered according to the amino acid sequence of SEQ ID NO: 138, W, S, P, T, A, G, L, Q, H, N, R, K, V, E, F, M, C, or Y. In some embodiments, the AAV capsid variant does not comprise the amino acid sequence of TGW at positions 593-595, numbered according to SEQ ID NO: 138.

[0018] In yet another aspect, provided herein is an isolated, e.g., recombinant, AAV particle comprising an AAV capsid variant and a nucleic acid comprising a transgene encoding a GBA protein, wherein the AAV capsid variant comprises X1-X2-X3-X4-X5-X6-X7-X8-X9-X10-X11-X12-X13-X14-X15-X16-X17-X18-X19, wherein: (i) X1 is: P, A, D, E, F, G, H, K, L, N, Q, R, S, T, or V; (ii) X2 is: L, D, E, F, H, I, M, N, P, Q, R, S, or V; (iii) X3 is: N, A, D, E, G, H, I, K, Q, S, T, V, or Y; (iv) X4 is: G, A, C, D, E, P, Q, R, S, T, V, or W; (v) X5 is: A, C, D, E, F, G, H, I, K, N, P, Q, R, S, T, V, W, or Y; (vi) X6 is: V, A, C, D, E, F, G, H, I, K, L, M, N, Q, R, S, T, or Y; (vii) X7 is: H, A, D, E, G, I, K, L, M, N, P, Q, R, S, T, V, or Y; (viii) X8 is: L, A, D, E, F, G, H, I, K, M, N, P, Q, R, S, T, V, or Y; (ix) X9 is: Y, A, C, D, E, F, G, H, I, K, L, M, N, Q, R, S, T, V, or W; (x) X10 is: A, C, D, E, F, G, H, I, K, L, N, P, Q, R, S, T, V, or, Y; (xi) X11 is: Q, A, D, E, H, K, L, P, R, or T; (xii) X12 is: A, D, E, G, H, L, N, P, Q, R, S, T, or V; (xiii) X13 is: Q, E, H, K, L, P, R, or T; (xiv) X14 is: T, A, C, D, E, F, G, H, I, K, L, M, N, P, Q, R, S, V, W, or Y; (xv) X15 is: G, A, C, D, E, F, H, I, K, L, M, N, P, Q, R, S, T, V, W, or Y; (xvi) X16 is: W, A, C, D, E, F, G, H, I, K, L, M, N, P, Q, R, S, T, V, or Y; (xvii) X17 is: V, A, D, E, F, G, H, I, or L; (xviii) X18 is: Q, E, H, K, L, P, or R; and/or (xix) X19 is: N, D, H, I, K, P, S, T, or Y.

[0019] In yet another aspect, provided herein is an isolated, e.g., recombinant, AAV particle comprising an AAV capsid variant and a nucleic acid comprising a transgene encoding a GBA protein, wherein the AAV capsid variant comprises: (a) the amino acid sequence of any one of SEQ ID NOs: 139-1138; (b) an amino acid sequence comprising at least 3, 4, 5, 6, 7, 8, 9, 10, 11, 12, 13, 14, 15, 16, 17, or 18 consecutive amino acids from any one of SEQ ID NOs: 139-1138; (c) an amino acid sequence comprising at least one, two, or three but no more than four different amino acids, relative to the amino acid sequence of any one of SEQ ID NOs: 139-1138; or (d) an amino sequence comprising at least one, two, or three but no more than four modifications, e.g., substitutions (e.g., conservative substitutions), insertions, or deletions, relative to the amino acid sequence of any one of SEQ ID NOs: 139-1138. In some embodiments, the AAV capsid variant does not comprise the amino acid sequence of TGW at positions 593-595, relative to a reference sequence numbered according to the amino acid sequence of SEQ ID NO: 138.

[0020] In another aspect, the disclosure provides an isolated, e.g., recombinant, nucleic acid comprising a transgene encoding a GBA protein and an enhancement element, wherein the encoded enhancement element comprises: a Saposin C polypeptide or functional fragment or variant thereof, optionally comprising the amino acid sequence of SEQ ID NO: 1789 or 1758, or an amino acid sequence at least 85% (e.g., at least 90%, 92%, 95%, 97%, 98%, or 99%) identical thereto; a cell penetrating peptide, optionally comprising the amino acid sequence of any of SEQ ID NOs: 1794, 1796, or 1798, or an amino acid sequence having at least one, two, or three but no more than four modifications, e.g., substitutions (e.g., conservative substitutions), relative to SEQ ID NOs: 1794, 1796, or 1798; and/or a lysosomal targeting sequence, optionally comprising the amino acid sequence of any of SEQ ID NOs: 1800, 1802, 1804, 1806, or 1808, or an amino acid sequence having at least one, two, or three but no more than four modifications, e.g., substitutions (e.g., conservative substitutions), relative to SEQ ID NOs: 1800, 1802, 1804, 1806, or 1808.

[0021] In another aspect, the present disclosure provides, an isolated, e.g., recombinant viral genome comprising a nucleic acid comprising a transgene encoding a GBA protein, and further comprising a nucleotide sequence encoding a miR binding site that modulates, e.g., reduces, expression of the encoded GBA protein in a cell or tissue of the DRG, liver, hematopoietic lineage, or a combination thereof. In some embodiments, the encoded miR binding site comprises a miR183 binding site. In some embodiments, the viral genome further encodes an enhancement element, e.g., an enhancement element described herein.

[0022] In yet another aspect, the present disclosure provides an isolated, e.g., recombinant viral genome comprising a promoter operably linked to a nucleic acid comprising a transgene encoding a GBA protein described herein. In some embodiments, the viral genome comprises an internal terminal repeat (ITR) sequence (e.g., an ITR region described herein), an enhancer (e.g., an enhancer described herein), an intron region (e.g., an intron region described herein), a Kozak sequence (e.g., a Kozak sequence described herein), an exon region (e.g., an exon region described herein), a nucleotide sequence encoding a miR binding site (e.g., a miR binding site described herein) and/or a poly A signal region (e.g., a poly A signal sequence described herein). In some embodiments, the viral genome comprises the nucleotide sequence of SEQ ID NO: 1812 or 1826, or a nucleotide sequence at least 95% identical thereto. In some embodiments, the viral genome comprises the nucleotide sequence of any one of SEQ ID NOs: 1759-1771, 1809-1811, or 1813-1827, or a nucleotide sequence at least 95% identical thereto.

[0023] In yet another aspect, the present disclosure provides an isolated, e.g., recombinant, AAV particle comprising a capsid protein and a viral genome comprising a promoter (e.g., a promoter described herein) operably linked transgene encoding a GBA protein described herein. In some embodiments, the capsid protein comprises an AAV capsid protein. In some embodiments, the capsid protein comprises a VOY101 capsid protein, an AAV9 capsid protein, or a functional variant thereof. In some embodiments, the capsid protein comprises an AAV capsid variant described herein.

[0024] In yet another aspect, the present disclosure provides a method of making a viral genome described herein The method comprising providing a nucleic acid encoding a viral genome described herein and a backbone region suitable for replication of the viral genome in a cell, e.g., a bacterial cell (e.g., wherein the backbone region comprises one or both of a bacterial origin of replication and a selectable marker), and excising the viral from the backbone region, e.g., by cleaving the nucleic acid molecule at upstream and downstream of the viral genome.

[0025] In yet another aspect, the present disclosure provides a method of making an isolated, e.g., recombinant AAV particle. The method comprising providing a host cell comprising a viral genome described herein and incubating the host cell under conditions suitable to enclose the viral genome in the AAV particle, e.g., an AAV capsid protein, e.g., AAV capsid variant described herein, thereby making the isolated AAV particle.

[0026] In yet another aspect, the present disclosure provides method of delivering an exogenous GBA protein, to a subject. The method comprises administering an effective amount of an AAV particle or a plurality of AAV particles, described herein, said AAV particle comprising a viral genome described herein, e.g., a viral genome comprising a nucleic acid comprising a transgene encoding a GBA protein described herein.

[0027] In yet another aspect, the present disclosure provides method of treating a subject having or diagnosed with having a disease associated with GBA expression, a neurological disorder, or a neuromuscular disorder. The method comprises administering an effective amount of an AAV particle or a plurality of AAV particles, described herein, said AAV particle comprising a viral genome described herein, e.g., a viral genome comprising a nucleic acid comprising a transgene encoding a GBA protein described herein. In some embodiments, the disease associated with expression of GBA or the neurodegenerative or neuromuscular disorder comprises Parkinson's Disease (PD) (e.g., a PD associated with a mutation in a GBA gene), dementia with Lewy Bodies (DLB), Gaucher disease (GD), Spinal muscular atrophy (SMA), Multiple System Atrophy (MSA), or Multiple sclerosis (MS).

[0028] In some aspects, the present disclosure provides AAV viral genomes comprising at least one inverted terminal repeat (ITR) and a payload region, wherein the payload region encodes one or more GCase proteins including GCase peptides. In some embodiments, the AAV viral genome comprises a 5′ ITR, a promoter, a payload region comprising a nucleotide sequence encoding a GCase protein, and a 3′ ITR. The encoded protein may be a human (Homo sapiens) GCase, a cynomolgus monkey (Macaca fascicularis) GCase, or a rhesus monkey (Macaca mulatta) GCase, a synthetic (non-naturally occurring) GCase, or a derivative thereof, e.g., a variant that retains one or more function of a wild-type GCase protein. In some embodiments, the GCase may be at least partially humanized.

[0029] The GCase of the present disclosure can be co-expressed with a saposin protein. In some embodiments, the transgene encoding the GCase includes a nucleotide sequence encoding the saposin protein. In some embodiments, the saposin protein is saposin A (SapA). In some embodiments, the saposin protein in saposin C (SapC).

[0030] Viral genomes may be incorporated into an AAV particle, wherein the AAV particle comprises a viral genome and a capsid. In some embodiments, the capsid comprises a sequence as shown in Table 1.

[0031] In some embodiments, the AAV particles described herein may be used in pharmaceutical compositions. The pharmaceutical compositions may be used to treat a disorder or condition associated with decreased GCase expression, activity, or protein levels. In some embodiments, the disorder or condition is a lysosomal lipid storage disorder. In some embodiments, the disorder or condition associated with decreased GCase protein levels is PD (e.g., a PD associated with a mutation in a GBA gene), Gaucher disease (e.g., Type 1 GD (e.g., non-neuronopathic GD), Type 2 (e.g., acute neuronopathic GD), or Type 3 GD), or other GBA-related disorder (e.g., dementia with Lewy Bodies (DLB). In some embodiments, administration of AAV particles may result in enhanced GCase expression in a target cell.

[0032] In some aspects, the present disclosure provides methods of increasing GCase enzyme activity in patients using AAV mediated gene transfer of an optimized GBA transgene cassette. The AAV mediated gene transfer can be optimized to achieve widespread CNS distribution, and thereby decrease substrate glycosphingolipid glucosylceramide/GluCer levels and α-synuclein pathology, slowing or reversing disease pathogenesis in patients with GBA-related disorders, including GBA patients with Parkinson disease (GBA-PD), Gaucher disease (e.g., Type 2 or 3 GD), and Dementia with Lewy body disease. In some embodiments, the methods involve intrastriatal (ISTR) or intracisternal (ICM) administration of AAV vectors packaging optimized GBA gene replacement transgene cassettes as described herein to achieve widespread, cell-autonomous transduction and cross-correction of therapeutic GCase enzyme.

[0033] Those skilled in the art will recognize or be able to ascertain using no more than routine experimentation, many equivalents to the specific embodiments of the invention described herein. Such equivalents are intended to be encompassed by the following enumerated embodiments.

### ENUMERATED EMBODIMENTS

1. An isolated, e.g., recombinant, nucleic acid comprising a transgene encoding a β-glucocerebrosidase (GBA) protein, wherein the nucleotide sequence encoding the GBA protein comprises a nucleotide sequence, e.g., a codon optimized nucleotide sequence, at least 88% (e.g., at least 89, 90, 92, 95, 96, 97, 98, or 99%) identical to the nucleotide sequence of SEQ ID NO: 1773.
2. The isolated nucleic acid of embodiment 1, wherein the nucleotide sequence encoding the GBA protein comprises a nucleotide sequence at least 90% identical to SEQ ID NO: 1773.
3. The isolated nucleic acid of embodiment 1 or 2, wherein the nucleotide sequence encoding the GBA protein comprises a nucleotide sequence at least 95% identical to SEQ ID NO: 1773.
4. The isolated nucleic acid of any one of embodiments 1-3, wherein the nucleotide sequence encoding the GBA protein comprises the nucleotide sequence of SEQ ID NO: 1773.
5. The isolated nucleic acid of any one of embodiments 1-4, further comprising an enhancement element.
6. An isolated, e.g., recombinant, AAV particle comprising an AAV capsid variant and a nucleic acid comprising a transgene encoding a lysosomal storage enzyme, e.g., a β-glucocerebrosidase (GBA) protein, wherein the AAV capsid variant:
[0034] (i) is enriched at least about 5, 6, 7, 8, 9, 10, 20, 30, 40, 50, 100, 200, 300, or 400-fold, in the brain, e.g., the brain of a non-human primate (NHP) compared to a reference sequence of SEQ ID NO: 138 (e.g., as provided in Table 34), e.g., when measured by an assay as described in Example 18;
[0035] (ii) transduces a brain region, e.g., a brain region of an NHP, e.g., selected from dentate nucleus, cerebellar cortex, cerebral cortex, brain stem, hippocampus, thalamus and putamen, wherein the level of transduction is at least 5, 10, 50, 100, 200, 500, 1,000, 2,000, 5,000, or 10,000-fold greater as compared to a reference sequence of SEQ ID NO: 138, e.g., when measured by an assay, e.g., an immunohistochemistry assay, a qRT-PCR, or a RT-ddPCR assay, e.g., as described in Example 19;
[0036] (iii) delivers an increased level of a payload to a brain region, e.g., a brain region of an NHP, optionally wherein the level of the payload is increased by at least 500, 1,000, 2,000, 5,000, or 10,000-fold, as compared to a reference sequence of SEQ ID NO: 138, e.g., when measured by an assay, e.g., a qRT-PCR or a RT-ddPCR assay (e.g., as described in Example 19), optionally wherein the brain region comprises a frontal cortex, sensory cortex, motor cortex, putamen, thalamus, cerebellar cortex, dentate nucleus, caudate, and/or hippocampus;
[0037] (iv) delivers an increased level of a payload to a spinal cord region, e.g., a spinal cord region of an NHP, optionally wherein the level of the payload is increased by at least 10, 20, 50, 100, 200, 300, 400, 500, 600, 700, 800 or 900-fold, as compared to a reference sequence of SEQ ID NO: 138, e.g., when measured by an assay, e.g., a qRT-PCR assay (e.g., as described in Example 19), optionally wherein the spinal cord region comprises a cervical, thoracic, and/or lumbar region; and/or
[0038] (v) delivers an increased level of viral genomes to a brain region, e.g., a brain region of an NHP, optionally wherein the level of viral genomes is increased by at least 5, 10, 20, 30, 40 or 50-fold, as compared to a reference sequence of SEQ ID NO: 138, e.g., when measured by an assay, e.g., a qRT-PCR or a RT-ddPCR assay (e.g., as described in Example 19), optionally wherein the brain region comprises a frontal cortex, sensory cortex, motor cortex, putamen, thalamus, cerebellar cortex, dentate nucleus, caudate, and/or hippocampus.
   7. An isolated, e.g., recombinant, AAV particle comprising an AAV capsid variant and a nucleic acid comprising a transgene encoding a β-glucocerebrosidase (GBA) protein, wherein the AAV capsid variant comprises:
[0039] (a) the amino acid sequence of any of SEQ ID NO: 3648-3659 or a sequence provided in Table 34;
[0040] (b) an amino acid sequence comprising at least 5, 6, 7, 8, or 9 consecutive amino acids from the amino acid sequence of any of SEQ ID NO: 3648-3659 or a sequence provided in Table 34;
[0041] (c) an amino acid sequence comprising at least one, two, or three but no more than four modifications, e.g., substitutions, (e.g., conservative substitutions), insertions, or deletions, relative to the amino acid sequence of any of 3648-3659 or a sequence provided in Table 34; or
[0042] (d) an amino acid sequence comprising at least one, two, or three but no more than four different amino acids relative to the amino acid sequence of any of 3648-3659 or a sequence provided in Table 34; optionally wherein the capsid variant comprises the amino acid sequence of SEQ ID NO: 138, or an amino acid sequence with at least 95% sequence identity thereto.
   8. The isolated AAV particle of any one of embodiments 6 or 7, wherein the AAV capsid variant comprises:
[0043] (a) the amino acid sequence of PLNGAVHLY (SEQ ID NO: 3648), or at least 5, 6, 7, or 8 consecutive amino acids from the amino acid sequence of PLNGAVHLY (SEQ ID NO: 3648);
[0044] (b) the amino acid sequence of IVMNSLK (SEQ ID NO: 3651), or at least 4, 5, or 6 consecutive amino acids from the amino acid sequence of IVMNSLK (SEQ ID NO: 3651); or
[0045] (c) the amino acid sequence of YSTDVRM (SEQ ID NO: 3650), YSTDERM (SEQ ID NO: 3657), or YSTDERK (SEQ ID NO: 3658), or at least 4, 5, or 6 consecutive amino acids from the amino acid sequence of YSTDVRM (SEQ ID NO: 3650), YSTDERM (SEQ ID NO: 3657), or YSTDERK (SEQ ID NO: 3658).
   9. The isolated AAV particle of embodiments 7 or 8, wherein:
[0046] (i) the 5 consecutive amino acids comprise PLNGA (SEQ ID NO: 3679);
[0047] (ii) the 6 consecutive amino acids comprise PLNGAV (SEQ ID NO: 3680);
[0048] (iii) the 7 consecutive amino acids comprise PLNGAVH (SEQ ID NO: 3681);
[0049] (iv) the 8 consecutive amino acids comprise PLNGAVHL (SEQ ID NO: 3682); and/or
[0050] (v) the 9 consecutive amino acids comprise PLNGAVHLY (SEQ ID NO: 3648);
[0051] optionally wherein the amino acid sequence of (i), (ii), (iii), (iv), or (v) is present immediately subsequent to position 586, relative to a reference sequence numbered according to the amino acid sequence of SEQ ID NO: 138.
   10. The isolated AAV particle of any one of embodiments 7-9, wherein:
[0052] (i) the 5 consecutive amino acids comprise IVMNS (SEQ ID NO: 3694);
[0053] (ii) the 6 consecutive amino acids comprise IVMNSL (SEQ ID NO: 3695); and/or
[0054] (iii) the 7 consecutive amino acids comprise IVMNSLK (SEQ ID NO: 3651),
[0055] optionally wherein the amino acid sequence of (i), (ii), or (iii) is present immediately subsequent to position 588, relative to a reference sequence numbered according to the amino acid sequence of SEQ ID NO: 138.
   11. The isolated AAV particle of any one of embodiments 6-10, wherein the AAV capsid variant comprises:
[0056] (i) the amino acid sequence of PLNGAVHLY (SEQ ID NO: 3648), wherein the amino acid sequence of PLNGAVHLY (SEQ ID NO: 3648) is present immediately subsequent to position 586, relative to a reference sequence numbered according to the amino acid sequence of SEQ ID NO: 138;
[0057] (ii) the amino acid sequence of GGTLAVVSL (SEQ ID NO: 3654), wherein the amino acid sequence of GGTLAVVSL (SEQ ID NO: 3654) is present immediately subsequent to position 586, relative to a reference sequence numbered according to the amino acid sequence of SEQ ID NO: 138;
[0058] (iii) the amino acid sequence of IVMNSLK (SEQ ID NO: 3651), wherein the amino acid sequence of IVMNSLK (SEQ ID NO: 3651) is present immediately subsequent to position 588, relative to a reference sequence numbered according to the amino acid sequence of SEQ ID NO: 138; or
[0059] (iv) the amino acid sequence of any of SEQ ID NOs: 3649, 3650, 3652, 3653, or 3655-3659, wherein the amino acid sequence of any of the aforesaid sequences is present immediately subsequent to position 589, relative to a reference sequence numbered according to the amino acid sequence of SEQ ID NO: 138.
   12. The isolated AAV particle of any one of embodiments 6-11, wherein:
[0060] (i) the AAV capsid variant comprises an amino acid sequence encoded by the nucleotide sequence of any one of SEQ ID NOs: 3660-3671, or a nucleotide sequence having at least 80%, 85%, 90%, 92%, 95%, 96%, 97%, 98%, or 99% sequence identity thereto;
[0061] (ii) the AAV capsid variant comprises an amino acid sequence encoded by a nucleotide sequence comprising at least one, two, three, four, five, six, or seven modifications, e.g., substitutions (e.g., conservative substitutions), but no more than ten modifications of the nucleotide sequences of any of SEQ ID NOs: 3660-3671;
[0062] (iii) the AAV capsid variant comprises an amino acid sequence encoded by a nucleotide sequence comprising at least one, two, three, four, five, six, or seven but no more than ten different nucleotides relative to the nucleotide sequences of any of SEQ ID NOs: 3660-3671;
[0063] (iv) the nucleotide sequence encoding the AAV capsid variant comprises the nucleotide sequence of any one of SEQ ID NOs: 3660-3671, or a nucleotide sequence having at least 80%, 85%, 90%, 92%, 95%, 96%, 97%, 98%, or 99% sequence identity thereto; and/or
[0064] (v) the nucleotide sequence encoding the AAV capsid variant comprises a nucleotide sequence comprising at least one, two, three, four, five, six, or seven modifications, e.g., substitutions (e.g., conservative substitutions), but no more than ten modifications of the nucleotide sequence of any of SEQ ID NOs: 3660-3671.
   13. The isolated AAV particle of any one of embodiments 6-12, wherein the AAV capsid variant comprises:
[0065] (i) the AAV capsid variant comprises the amino acid sequence of any one of SEQ ID NOs: 3636-3647, or an amino acid sequence with at least 90% (e.g., at least 95, 96, 97, 98, or 99%) sequence identity thereto; or
[0066] (ii) the nucleotide sequence encoding the AAV capsid variant comprises the nucleotide sequence of any one of SEQ ID NOs: 3623-3635, or a nucleotide sequence with at least 90% (e.g., at least 95, 96, 97, 98, or 99%) sequence identity thereto.
   14. An isolated, e.g., recombinant, AAV particle comprising an AAV capsid variant and a nucleic acid comprising a transgene encoding a β-glucocerebrosidase (GBA) protein, wherein the AAV capsid variant comprises:
[0067] (i) the amino acid sequence of PLNGAVHLY (SEQ ID NO: 3648);
[0068] (ii) an amino acid sequence comprising at least 5, 6, 7, 8, or 9 consecutive amino acids from the amino acid sequence of PLNGAVHLY (SEQ ID NO: 3648);
[0069] (iii) an amino acid sequence comprising at least one, two, or three but no more than four modifications, e.g., substitutions (e.g., conservative substitutions), insertions, or deletions, relative to the amino acid sequence of PLNGAVHLY (SEQ ID NO: 3648); or
[0070] (iv) an amino acid sequence comprising at least one, two, or three but no more than four different amino acids relative to the amino acid sequence of PLNGAVHLY (SEQ ID NO: 3648);
[0071] optionally wherein the capsid variant comprises the amino acid sequence of SEQ ID NO: 138, or an amino acid sequence with at least 95% sequence identity thereto.
   15. The isolated AAV particle of embodiment 14, wherein the amino acid sequence of (i), (ii), or (iii) is present in loop VIII, relative to a reference sequence of SEQ ID NO: 138.
   16. The isolated AAV particle of any one of embodiments 14 or 15, wherein the amino acid sequence is present immediately subsequent to position 586, relative to a reference sequence numbered according to the amino acid sequence of SEQ ID NO: 138.
   17. The isolated AAV particle of any one of embodiments 6-16, wherein the AAV capsid variant:
[0072] (i) is enriched at least about 300 or 400-fold compared, in the brain compared to a reference sequence of SEQ ID NO: 138, e.g., when measured by an assay as described in Example 18;
[0073] (ii) transduces a brain region, e.g., selected from dentate nucleus, cerebellar cortex, cerebral cortex, brain stem, hippocampus, thalamus and putamen, wherein the level of transduction is at least 500, 1,000, 2,000, 5,000, or 10,000-fold greater as compared to a reference sequence of SEQ ID NO: 138, e.g., when measured by an assay, e.g., an immunohistochemistry assay, a qRT-PCR, or a RT-ddPCR assay, e.g., as described in Example 19;
[0074] (iii) delivers an increased level of a payload to a brain region, optionally wherein the level of the payload is increased by at least 500, 1,000, 2,000, 5,000, or 10,000-fold, as compared to a reference sequence of SEQ ID NO: 138, e.g., when measured by an assay, e.g., a qRT-PCR or a RT-ddPCR assay (e.g., as described in Example 19), optionally wherein the brain region comprises a frontal cortex, sensory cortex, motor cortex, putamen, thalamus, cerebellar cortex, dentate nucleus, caudate, and/or hippocampus;
[0075] (iv) delivers an increased level of a payload to a spinal cord region, optionally wherein the level of the payload is increased by at least 50, 100, 200, 300, 400, 500, 600, 700, 800 or 900-fold, as compared to a reference sequence of SEQ ID NO: 138, e.g., when measured by an assay, e.g., a qRT-PCR assay (e.g., as described in Example 19), optionally wherein the spinal cord region comprises a cervical, thoracic, and/or lumbar region; and/or
[0076] (v) delivers an increased level of viral genomes to a brain region, optionally wherein the level of viral genomes is increased by at least 5, 10, 20, 30, 40 or 50-fold, as compared to a reference sequence of SEQ ID NO: 138, e.g., when measured by an assay, e.g., a qRT-PCR or a RT-ddPCR assay (e.g., as described in Example 19), optionally wherein the brain region comprises a frontal cortex, sensory cortex, motor cortex, putamen, thalamus, cerebellar cortex, dentate nucleus, caudate, and/or hippocampus.
   18. The isolated AAV particle of any one of embodiments 6-13 or 15, wherein the AAV capsid variant:
[0077] (i) the AAV capsid variant has an increased tropism for a muscle cell or tissue, e.g., a heart tissue, relative to the tropism of a reference sequence comprising the amino acid sequence of SEQ ID NO: 138; and/or
[0078] (ii) delivers an increased level of a payload to a muscle region, optionally wherein the level of the payload is increased by at least 10, 15, 20, 30, or 40-fold, as compared to a reference sequence of SEQ ID NO: 138, e.g., when measured by an assay, e.g., an IHC assay or a RT-ddPCR assay (e.g., as described in Example 19), optionally wherein the muscle region comprises a heart muscle (e.g., a heart atrium muscle region or a heart ventricle muscle region), quadriceps muscle, and/or a diaphragm muscle region.
   19. The isolated AAV particle of any one of embodiments 6-18, wherein the AAV capsid variant comprises:
[0079] (i) a VP1 protein, a VP2 protein, a VP3 protein, or a combination thereof;
[0080] (ii) the amino acid sequence corresponding to positions 138-743, e.g., a VP2, of any one of SEQ ID NOs: 3636-3647, or a sequence with at least 90% (e.g., at least about 95, 96, 97, 98, or 99%) sequence identity thereto;
[0081] (iii) the amino acid sequence corresponding to positions 203-743, e.g., a VP3, of any one of SEQ ID NOs: 3636-3647, or a sequence with at least 90% (e.g., at least about 95, 96, 97, 98, or 99%) sequence identity thereto;
[0082] (iv) the amino acid sequence of any one of SEQ ID NOs: 3636-3647, or an amino acid sequence with at least 90% (e.g., at least about 95, 96, 97, 98, or 99%) sequence identity thereto;
[0083] (v) an amino acid sequence having at least one, two or three modifications, but not more than 30, 20 or 10 modifications, e.g., substitutions (e.g., conservative substitutions), of the amino acid sequence of any one of SEQ ID NOs: 3636-3647;
[0084] (vi) an amino acid sequence having at least one, two or three, but no more than 30, 20 or 10 different amino acids relative to the amino acid sequence of any one of SEQ ID NOs: 3636-3647; and/or
[0085] (vii) an amino acid sequence encoded by the nucleotide sequence of any one of SEQ ID NOs: 3623-3635, or a nucleotide sequence with at least 90% (e.g., at least about 95, 96, 97, 98, or 99%) sequence identity thereto.
   20. An isolated, e.g., recombinant, AAV particle comprising an AAV capsid variant and a nucleic acid comprising a transgene encoding a β-glucocerebrosidase (GBA) protein, wherein the AAV capsid variant comprises an amino sequence comprising the following formula: [N1]-[N2], wherein:
[0086] (i) [N1] comprises X1, X2, X3, X4, and X5, wherein:
   [0087] (a) position X1 is: P, Q, A, H, K, L, R, S, or T;
   [0088] (b) position X2 is: L, I, V, H, or R;
   [0089] (c) position X3 is: N, D, I, K, or Y;
   [0090] (d) position X4 is: G, A, C, R, or S; and
   [0091] (e) position X5 is: A, S, T, G, C, D, N, Q, V, or Y; and
[0092] (ii) [N2] comprises the amino acid sequence of VHLY (SEQ ID NO: 4680), VHIY (SEQ ID NO: 4681), VHVY (SEQ ID NO: 4682), or VHHY (SEQ ID NO: 4683); and/or an amino acid modification, e.g., a conservative substitution, of any of the aforesaid amino acids in (i) and/or (ii);
[0093] optionally wherein the AAV capsid variant further comprises:
[0094] (a) one, two, or all of an amino acid other than T at position 593 (e.g., V, L, R, S, A, C, I, K, M, N, P, or Q), an amino acid other than G at position 594 (e.g., S, A, T, M, V, Q, L, H, I, K, N, P, R, or Y), and/or an amino acid other than W at position 595 (e.g., S, P, G, A, Q, L, M, K, C, E, F, H, R, T, V, or Y), relative to a reference sequence numbered according to the amino acid sequence of SEQ ID NO: 138; and/or
[0095] (b) one, two, or all of an amino acid other than V at position 596 (e.g., D, F, G, L, A, E, or I), an amino acid other than Q at position 597 (e.g., P, K, R, H, E, or L), and/or an amino acid other than N at position 598 (e.g., T, K, H, D, Y, S, I, or P), relative to a reference sequence numbered according to the amino acid sequence of SEQ ID NO: 138;
[0096] (c) the amino acid L, T, V, R, S, A, C, I, K, M, N, P, or Q at position 600, the amino acid S, G, A, T, M, V, Q, L, H, I, K, N, P, R, or Y at position 601, and the amino P, W, S, G, A, Q, L, M, K, C, E, F, H, R, T, V, or Y at position 602, numbered according to the amino acid sequence of SEQ ID NO: 5, 8, 3636, wherein the AAV capsid variant does not comprise the amino acid sequence TGW at position 600-602, numbered according to SEQ ID NO: 5, 8, or 3636; and/or
[0097] (d) the amino acid V, D, F, G, L, A, E, or I at position 603, the amino acid K, P, Q, R, H, E, or L at position 604, and the amino acid N, T, K, H, D, Y, S, I, or P, numbered according to the amino acid sequence of SEQ ID NO: 5, 8, or 3636, wherein the AAV capsid variant does not comprise the amino acid sequence VQN at position 603-605, numbered according to SEQ ID NO: 5, 8, or 3636; and/or
[0098] (e) one, two, three, four, or all of an amino acid other then P at position X1, an amino acid other than L at position X2, an amino acid other than N at position X3, an amino acid other than G at position X4, or an amino acid other than A at position X5.
   21. An isolated, e.g., recombinant, AAV particle comprising an AAV capsid variant and a nucleic acid comprising a transgene encoding a β-glucocerebrosidase (GBA) protein, wherein the AAV capsid variant comprises one, two, three, four, or all of:
[0099] (i) an [N1], wherein [N1] is or comprises: PLNGA (SEQ ID NO: 3679), SLNGA (SEQ ID NO: 4684), QLNGA (SEQ ID NO: 4685), ALNGA (SEQ ID NO: 4686), PLNGS (SEQ ID NO: 4687), PVNGA (SEQ ID NO: 4688), PLNGG (SEQ ID NO: 4689), PLNGT (SEQ ID NO: 4690), PLDGA (SEQ ID NO: 4691), QLNGS (SEQ ID NO: 4692), PLNGN (SEQ ID NO: 4693), SLDGA (SEQ ID NO: 4694), HLNGA (SEQ ID NO: 4695), ALNGT (SEQ ID NO: 4696), PINGA (SEQ ID NO: 4697), ALDGA (SEQ ID NO: 4698), PLNCA (SEQ ID NO: 4699), PLNGQ (SEQ ID NO: 4700), PLDSA (SEQ ID NO: 4701), RLDGA (SEQ ID NO: 4702), QLNGN (SEQ ID NO: 4703), PLNGY (SEQ ID NO: 4704), PLDSS (SEQ ID NO: 4705), PLNGC (SEQ ID NO: 4706), PLYGA (SEQ ID NO: 4707), TLNGA (SEQ ID NO: 4708), PVDGA (SEQ ID NO: 4709), PLKGA (SEQ ID NO: 4710), PLNGD (SEQ ID NO: 4711), KLDGA (SEQ ID NO: 4712), PHNGA (SEQ ID NO: 4713), PLNGV (SEQ ID NO: 4714), PLNAA (SEQ ID NO: 4715), QLNGY (SEQ ID NO: 4716), PLDGS (SEQ ID NO: 4717), LLNGA (SEQ ID NO: 4718), PLNRA (SEQ ID NO: 4719), PLIGA (SEQ ID NO: 4720), PRNGA (SEQ ID NO: 4721), or ALNGS (SEQ ID NO: 4722);
[0100] (ii) an [N2] wherein [N2] is or comprises: VHLY (SEQ ID NO: 4680), VHVY (SEQ ID NO: 4682), VPLY (SEQ ID NO: 4723), VNLY (SEQ ID NO: 4724), VHRY (SEQ ID NO: 4725), VHIY (SEQ ID NO: 4681), VHHY (SEQ ID NO: 4683), FHLY (SEQ ID NO: 4726), LHLY (SEQ ID NO: 4727), DHLY (SEQ ID NO: 4728), VQLY (SEQ ID NO: 4729), IHLY (SEQ ID NO: 4730), VDLY (SEQ ID NO: 4731), AHLY (SEQ ID NO: 4732), VLLY (SEQ ID NO: 4733), GHLY (SEQ ID NO: 4734), VRLY (SEQ ID NO: 4735), or VYLY (SEQ ID NO: 4736);
[0101] (iii) an [N3] wherein [N3] is or comprises: AQAQ (SEQ ID NO: 4737), SQAQ (SEQ ID NO: 4738), AQPQ (SEQ ID NO: 4739), AQSQ (SEQ ID NO: 4740), AKAQ (SEQ ID NO: 4741), AHAQ (SEQ ID NO: 4742), AQAP (SEQ ID NO: 4743), DQAQ (SEQ ID NO: 4744), APAQ (SEQ ID NO: 4745), AQAK (SEQ ID NO: 4746), AQAH (SEQ ID NO: 4747), AQEQ (SEQ ID NO: 4748), ALAQ (SEQ ID NO: 4749), ARAQ (SEQ ID NO: 4750), or TQAQ (SEQ ID NO: 4751);
[0102] (iv) an [N4] wherein [N4] is or comprises: TGW, TGL, TGS, TGG, TAW, TGR, TAS, LSS, TSS, SSL, SSS, TLS, TVS, VSS, TSP, VSP, TMS, LSP, VAS, TAL, TTS, TLP, VLP, RGW, LSG, LAS, SSP, LLP, STS, TSA, TTP, SAL, LGS, VTP, VSA, IGW, TGF, LTP, TLA, LSA, TVG, TAP, TMP, TSL, VQS, SSM, SLP, VSQ, RSS, TST, VMS, TTA, TQP, LST, LAP, TVA, RLS, TGY, TSG, TAG, VMP, TSQ, TMA, VGS, TSW, TGV, TGT, TLG, LMP, VQP, TGM, SMS, SQL, IGS, RSV, TAA, STP, LSQ, TAQ, TGP, ASP, VSG, SAP, TLQ, LQP, TAT, TGQ, ATS, IGG, VAA, TSM, TVW, TAM, TGA, VAT, QSP, TQA, VQA, RSP, LAT, VAQ, LAA, RST, RTL, LGT, LMS, LGP, RTS, SQP, VLG, SVS, TMQ, SAV, LAG, SGP, TNS, RLT, TQ, SAA, TSV, RLG, RAS, STQ, CSP, SAG, ALP, VTS, ISP, SVG, LTS, TIT, RSG, TQL, LNP, TVQ, IAS, LAQ, LSR, LSN, TTG, TSN, SMA, TKS, SVA, TQQ, VQQ, RLP, SAM, TAV, TQW, SSR, TQT, VNS, RSA, LMG, RQS, LVG, VTA, RU, SMG, VMA, TKP, SAQ, NSP, ATP, VAG, RGS, VKP, RMS, NLP, NAL, RTP, RQL, VQG, VTG, VST, NAS, RVE, ATG, AMS, RNS, VMQ, SMQ, LQQ, TMG, LGQ, TSH, AAP, RSQ, TYS, ITP, VAK, TQM, TKA, SQQ, ISG, VSR, RTA, RML, SQM, VAN, CTP, ISS, AGP, TAK, RTG, LHP, TMT, AQP, QAP, RQP, LKS, NTT, TSK, RYS, KSS, NTP, VGG, IAA, LMA, MAP, VHP, VLS, LAN, ATQ, TNA, TAN, VSN, AAA, AVG, LTA, SAN, RAG, RQG, TLR, LSH, SAF, RAA, IQP, ILG, VNG, SVQ, LSK, TNG, RTQ, TMN, RGG, TTR, VRP, VKA, LAR, NQP, TMK, TYA, TQK, UK, IAG, TQN, LAH, NTQ, RQQ, RAQ, TKQ, TQH, TNQ, LMQ, VNA, VQT, TQR, VGK, VKQ, IQS, LQR, TMM, VGN, RIG, SAK, RIA, VQN, NVQ, RIP, NAQ, NMQ, TPS, LTN, VTK, PGW, LPP, SPP, TPA, TGC, VPP, TPT, TPW, TPP, RPP, TPQ, TPR, TPG, VPA, VPQ, RPG, KGW, TRW, TAR, IPP, RSL, LVP, KGS, VAP, KGG, KAW, PGS, TRL, or AGW; and/or
[0103] (v) an [N5] wherein [N5] is or comprises: VQN, VKN, VQT, VQK, DQN, VQH, GQN, VQI, VHN, FQN, LQN, VLN, VRN, VQS, VQY, AQN, VEN, VQD, VPN, IQN, VKK, DKN, VKT, VQP, EQN, GQT, FQK, GHN, or VPH; and/or
[0104] wherein the AAV capsid variant comprises an amino acid modification, e.g., a conservative substitution, of any of the aforesaid amino acids in (i)-(v).
   22. The isolated AAV particle of embodiment 20, wherein:
[0105] (a) position X1 is: P, Q, A, S, or T;
[0106] (b) position X2 is L or I;
[0107] (c) position X3 is N or D;
[0108] (d) position X4 is G or S; and/or
[0109] (e) position X5 is: A, S, G, T, or N.
   23. The isolated AAV particle of embodiment 20 or 22, wherein [N1] comprises AL, PI, PL, QL, SL, TL, LN, LD, IN, NG, DG, DS, GA, SA, SS, GG, GN, GS, or GT.
   24. The isolated AAV particle of any one of embodiments 20, 22, or 23, wherein [N1] comprises ALD, ALN, PIN, PLD, PLN, QLN, SLD, SLN, TLN, LNG, LDG, ING, LDS, NGA, DGA, DSA, DSS, NGG, NGN, NGS, NGT.
   25. The isolated AAV particle of any one of embodiments 20 or 22-24, wherein [N1] comprises ALDG (SEQ ID NO: 4762), ALNG (SEQ ID NO: 4758), PING (SEQ ID NO: 4763), PLDG (SEQ ID NO: 4764), PLDS (SEQ ID NO: 4765), PLNG (SEQ ID NO: 3678), QLNG (SEQ ID NO: 4766), SLDG (SEQ ID NO: 4767), SLNG (SEQ ID NO: 4756), or TLNG (SEQ ID NO: 4754).
   26. The isolated AAV particle of any one of embodiments 20-25, wherein [N1] is or comprises PLNGA (SEQ ID NO: 3679), SLNGA (SEQ ID NO: 4684), QLNGA (SEQ ID NO: 4685), ALNGA (SEQ ID NO: 4686), PLNGS (SEQ ID NO: 4687), PVNGA (SEQ ID NO: 4688), PLNGG (SEQ ID NO: 4689), PLNGT (SEQ ID NO: 4690), PLDGA (SEQ ID NO: 4691), QLNGS (SEQ ID NO: 4692), PLNGN (SEQ ID NO: 4693), SLDGA (SEQ ID NO: 4694), HLNGA (SEQ ID NO: 4695), ALNGT (SEQ ID NO: 4696), PINGA (SEQ ID NO: 4697), ALDGA (SEQ ID NO: 4698), PLNCA (SEQ ID NO: 4699), PLNGQ (SEQ ID NO: 4700), PLDSA (SEQ ID NO: 4701), RLDGA (SEQ ID NO: 4702), QLNGN (SEQ ID NO: 4703), PLNGY (SEQ ID NO: 4704), PLDSS (SEQ ID NO: 4705), PLNGC (SEQ ID NO: 4706), PLYGA (SEQ ID NO: 4707), TLNGA (SEQ ID NO: 4708), PVDGA (SEQ ID NO: 4709), PLKGA (SEQ ID NO: 4710), PLNGD (SEQ ID NO: 4711), KLDGA (SEQ ID NO: 4712), PHNGA (SEQ ID NO: 4713), PLNGV (SEQ ID NO: 4714), PLNAA (SEQ ID NO: 4715), QLNGY (SEQ ID NO: 4716), PLDGS (SEQ ID NO: 4717), LLNGA (SEQ ID NO: 4718), PLNRA (SEQ ID NO: 4719), PLIGA (SEQ ID NO: 4720), PRNGA (SEQ ID NO: 4721), or ALNGS (SEQ ID NO: 4722).
   27. The isolated AAV particle of embodiment 20-26, wherein [N1] is or comprises PLNGA (SEQ ID NO: 3679), ALDGA (SEQ ID NO: 4698), ALNGA (SEQ ID NO: 4686), PINGA (SEQ ID NO: 4697), PLDGA (SEQ ID NO: 4691), PLDSA (SEQ ID NO: 4701), PLDSS (SEQ ID NO: 4705), PLNGG (SEQ ID NO: 4689), PLNGN (SEQ ID NO: 4693), PLNGS (SEQ ID NO: 4687), PLNGT (SEQ ID NO: 4690), QLNGA (SEQ ID NO: 4685), SLDGA (SEQ ID NO: 4694), SLNGA (SEQ ID NO: 4684), or TLNGA (SEQ ID NO: 4708).
   28. The isolated AAV particle of embodiment 20-27, wherein [N1] is or comprises PLNGA (SEQ ID NO: 3679).
   29. The isolated AAV particle of any one of embodiments 20 or 22-23 or 25-28, wherein [N1]-[N2] comprises:

(i)
(SEQ ID NO: 4768)
LDGAVHLY,
(SEQ ID NO: 4769)
LNGAVHLY,
(SEQ ID NO: 4770)
INGAVHLY,
(SEQ ID NO: 4771)
LDSAVHLY,
(SEQ ID NO: 4772)
LDSSVHLY,
(SEQ ID NO: 4773)
LNGGVHLY,
(SEQ ID NO: 4774)
LNGNVHLY,
(SEQ ID NO: 4775)
LNGSVHLY,
(SEQ ID NO: 4776)
LNGTVHLY,
(SEQ ID NO: 4777)
LNGAVHIY,
(SEQ ID NO: 4778)
LDGAVHVY,
or
(SEQ ID NO: 4779)
LNGAVHHY;

[0110] (ii) an amino acid sequence comprising any portion of an amino acid sequence in (i), e.g., any 2, 3, 4, 5, 6, or 7 amino acids, e.g., consecutive amino acids, thereof;
[0111] (iii) an amino acid sequence comprising at least one, two, or three but no more than four modifications, e.g., substitutions (e.g., conservative substitutions), insertions, or deletions, relative to any of the amino acid sequences in (i); or
[0112] (iv) an amino acid sequence comprising at least one, two, or three but no more than four different amino acids, relative to any one of the amino acid sequences in (i).
   30. The isolated AAV particle of any one of embodiments 20-29, wherein [N1]-[N2] is or comprises:

(i)
(SEQ ID NO: 3648)
PLNGAVHLY,
(SEQ ID NO: 4780)
ALDGAVHLY,
(SEQ ID NO: 4781)
ALNGAVHLY,
(SEQ ID NO: 4782)
PINGAVHLY,
(SEQ ID NO: 4783)
PLDGAVHLY,
(SEQ ID NO: 4784)
PLDSAVHLY,
(SEQ ID NO: 4785)
PLDSSVHLY,
(SEQ ID NO: 4786)
PLNGGVHLY,
(SEQ ID NO: 4787)
PLNGNVHLY,
(SEQ ID NO: 4788)
PLNGSVHLY,
(SEQ ID NO: 4789)
PLNGTVHLY,
(SEQ ID NO: 4790)
QLNGAVHLY,
(SEQ ID NO: 4791)
SLDGAVHLY,
(SEQ ID NO: 4792)
SLNGAVHLY,
(SEQ ID NO: 4793)
TLNGAVHLY,
(SEQ ID NO: 4794)
PLNGAVHIY,
(SEQ ID NO: 4795)
PLDGAVHVY,
or
(SEQ ID NO: 4796)
PLNGAVHHY;

[0113] (ii) an amino acid sequence comprising any portion of an amino acid sequence in (i), e.g., any 2, 3, 4, 5, 6, 7, or 8 amino acids, e.g., consecutive amino acids, thereof;
[0114] (iii) an amino acid sequence comprising at least one, two, or three but no more than four modifications, e.g., substitutions (e.g., conservative substitutions), insertions, or deletions, relative to any of the amino acid sequences in (i); or
[0115] (iv) an amino acid sequence comprising at least one, two, or three but no more than four different amino acids, relative to any one of the amino acid sequences in (i).
   31. The isolated AAV particle of any one of embodiments 20-30, wherein [N1]-[N2] is or comprises PLNGAVHLY (SEQ ID NO: 3648).
   32. The isolated AAV particle of any one of embodiments 20-31, wherein the AAV capsid variant further comprises one, two, three, or all of an amino acid other than A at position 589 (e.g., D, S, or T), an amino acid other than Q at position 590 (e.g., K, H, L, P, or R), an amino acid other than A at position 591 (e.g., P, E, or R), and/or an amino acid other than Q at position 592 (e.g., H, K, or P).
   33. The isolated AAV particle of any one of embodiments 20-32, wherein the AAV capsid variant further comprises one, two, three, or all of an amino acid other than A at position 596 (e.g., D, S, or T), an amino acid other than Q at position 597 (e.g., K, H, L, P, or R), an amino acid other than A at position 598 (e.g., P, E, or R), and/or an amino acid other than Q at position 599 (e.g., H, K, or P), numbered according to the amino acid sequence of SEQ ID NO: 5, 8, or 3636.
   34. The isolated AAV particle of any one of embodiments 20-31, wherein the AAV capsid variant further comprises
[0116] (i) A at position 589, Q at position 590, A at position 591, and/or Q at position 592, numbered according to the amino acid sequence of SEQ ID NO: 138; or
[0117] (ii) A at position 596, Q at position 597, A at position 598, and/or Q at position 599, numbered according to the amino acid sequence of SEQ ID NO: 5, 8, or 3636.
   35. The isolated AAV particle of any one of embodiments 20 or 22-34, wherein the AAV capsid variant further comprises [N3], wherein [N3] comprises X6, X7, X8, and X9, wherein:
[0118] (a) position X6 is: A, D, S, or T;
[0119] (b) position X7 is: Q, K, H, L, P, or R;
[0120] (c) position X8 is: A, P, E, or R; and
[0121] (d) position X9 is: Q, H, K, or P; and/or
   an amino acid modification, e.g., a conservative substitution, of any of the aforesaid amino acids in (a)-(d).
   36. The isolated AAV particle of embodiment 35, wherein:
[0122] (a) position X6 is: A, D, S;
[0123] (b) position X7 is Q or K;
[0124] (c) position X8 is A or P; and/or
[0125] (d) position X9 is Q.
   37. The isolated AAV particle of embodiment 35 or 36, wherein [N3] comprises AQ, SQ, AK, DQ, PQ, QA, QP, or KA.
   38. The isolated AAV particle of any one of embodiments 35-37, wherein [N3] comprises AQA, AQP, SQA, AKA, DQA, QAQ, QPQ, or KAQ.
   39. The isolated AAV particle of any one of embodiments 35-38, wherein [N3] is or comprises AQAQ (SEQ ID NO: 4737), SQAQ (SEQ ID NO: 4738), AQPQ (SEQ ID NO: 4739), AQSQ (SEQ ID NO: 4740), AKAQ (SEQ ID NO: 4741), AHAQ (SEQ ID NO: 4742), AQAP (SEQ ID NO: 4743), DQAQ (SEQ ID NO: 4744), APAQ (SEQ ID NO: 4745), AQAK (SEQ ID NO: 4746), AQAH (SEQ ID NO: 4747), AQEQ (SEQ ID NO: 4748), ALAQ (SEQ ID NO: 4749), ARAQ (SEQ ID NO: 4750), or TQAQ (SEQ ID NO: 4751).
   40. The isolated AAV particle of any one of embodiments 21 or 35-39, wherein [N3] is or comprises AQAQ (SEQ ID NO: 4737), AQPQ (SEQ ID NO: 4739), SQAQ (SEQ ID NO: 4738), AKAQ (SEQ ID NO: 4741), or DQAQ (SEQ ID NO: 4744).
   41. The isolated AAV particle of any one of embodiments 21 or 35-40, wherein [N3] is or comprises AQAQ (SEQ ID NO: 4737).
   42. The isolated AAV particle of any one of embodiments 21 or 35-41, wherein [N2]-[N3] comprises:
[0126] (i) VHLYAQAQ (SEQ ID NO: 4797), VHLYAQPQ (SEQ ID NO: 4798), VHLYSQAQ (SEQ ID NO: 4799), VHLYAKAQ (SEQ ID NO: 4800), VHLYDQAQ (SEQ ID NO: 4801), VHIYAQAQ (SEQ ID NO: 4802), VHVYAQAQ (SEQ ID NO: 4803), VHHYAQAQ (SEQ ID NO: 4804);
[0127] (ii) an amino acid sequence comprising any portion of an amino acid sequence in (i), e.g., any 2, 3, 4, 5, 6, or 7 amino acids, e.g., consecutive amino acids, thereof;
[0128] (iii) an amino acid sequence comprising at least one, two, or three but no more than four modifications, e.g., substitutions (e.g., conservative substitutions), insertions, or deletions, relative to any of the amino acid sequences in (i); or
[0129] (iv) an amino acid sequence comprising at least one, two, or three but no more than four different amino acids, relative to any one of the amino acid sequences in (i).
   43. The isolated AAV particle of any one of embodiments 21 or 35-42, wherein [N2]-[N3] is or comprises VHLYAQAQ (SEQ ID NO: 4797).
   44. The isolated AAV particle of any one of embodiments 35-43, wherein [N1]-[N2]-[N3] comprises:

(i)
(SEQ ID NO: 4805)
ALDGAVHLYAQ,
(SEQ ID NO: 4806)
ALNGAVHLYAQ,
(SEQ ID NO: 4807)
PINGAVHLYAQ,
(SEQ ID NO: 4808)
PLDGAVHLYAQ,
(SEQ ID NO: 4809)
PLDGAVHLYSQ,
(SEQ ID NO: 4810)
PLDSAVHLYAQ,
(SEQ ID NO: 4811)
PLDSSVHLYAQ,
(SEQ ID NO: 4812)
PLNGAVHLYAK,
(SEQ ID NO: 4813)
PLNGAVHLYAQ,
(SEQ ID NO: 4814)
PLNGAVHLYDQ,
(SEQ ID NO: 4815)
PLNGAVHLYSQ,
(SEQ ID NO: 4816)
PLNGGVHLYAQ,
(SEQ ID NO: 4817)
PLNGNVHLYAQ,
(SEQ ID NO: 4818)
PLNGSVHLYAQ,
(SEQ ID NO: 4819)
PLNGTVHLYAQ,
(SEQ ID NO: 4820)
QLNGAVHLYAQ,
(SEQ ID NO: 4821)
SLDGAVHLYAQ,
(SEQ ID NO: 4822)
SLNGAVHLYAQ,
(SEQ ID NO: 4823)
TLNGAVHLYAQ,
(SEQ ID NO: 4824)
PLNGAVHIYAQ,
(SEQ ID NO: 4825)
PLDGAVHVYAQ,
or
(SEQ ID NO: 4826)
PLNGAVHHYAQ;

[0130] (ii) an amino acid sequence comprising any portion of an amino acid sequence in (i), e.g., any 2, 3, 4, 5, 6, 7, 8, 9, or 10 amino acids, e.g., consecutive amino acids, thereof;
[0131] (iii) an amino acid sequence comprising at least one, two, or three but no more than four modifications, e.g., substitutions (e.g., conservative substitutions), insertions, or deletions, relative to any of the amino acid sequences in (i); or
[0132] (iv) an amino acid sequence comprising at least one, two, or three but no more than four different amino acids, relative to any one of the amino acid sequences in (i).
   45. The isolated AAV particle of any one of embodiments 21 or 35-44, wherein [N1]-[N2]-[N3] is or comprises:

(i)
(SEQ ID NO: 4836)
PLNGAVHLYAQAQ,
(SEQ ID NO: 4827)
ALDGAVHLYAQAQ,
(SEQ ID NO: 4828)
ALNGAVHLYAQAQ,
(SEQ ID NO: 4829)
PINGAVHLYAQAQ,
(SEQ ID NO: 4830)
PLDGAVHLYAQAQ,
(SEQ ID NO: 4831)
PLDGAVHLYAQPQ,
(SEQ ID NO: 4832)
PLDGAVHLYSQAQ,
(SEQ ID NO: 4833)
PLDSAVHLYAQAQ,
(SEQ ID NO: 4834)
PLDSSVHLYAQAQ,
(SEQ ID NO: 4835)
PLNGAVHLYAKAQ,
(SEQ ID NO: 4837)
PLNGAVHLYAQPQ,
(SEQ ID NO: 4838)
PLNGAVHLYDQAQ,
(SEQ ID NO: 4839)
PLNGAVHLYSQAQ,
(SEQ ID NO: 4840)
PLNGGVHLYAQAQ,
(SEQ ID NO: 4841)
PLNGNVHLYAQAQ,
(SEQ ID NO: 4842)
PLNGSVHLYAQAQ,
(SEQ ID NO: 4843)
PLNGTVHLYAQAQ,
(SEQ ID NO: 4844)
QLNGAVHLYAQAQ,
(SEQ ID NO: 4845)
SLDGAVHLYAQAQ,
(SEQ ID NO: 4846)
SLNGAVHLYAQAQ,
(SEQ ID NO: 4847)
TLNGAVHLYAQAQ,
(SEQ ID NO: 4848)
PLNGAVHIYAQAQ,
(SEQ ID NO: 4849)
PLDGAVHVYAQAQ,
or
(SEQ ID NO: 4850)
PLNGAVHHYAQAQ;

[0133] (ii) an amino acid sequence comprising any portion of an amino acid sequence in (i), e.g., any 2, 3, 4, 5, 6, 7, 8, 9, 10, 11, or 12 amino acids, e.g., consecutive amino acids, thereof;
[0134] (iii) an amino acid sequence comprising at least one, two, or three but no more than four modifications, e.g., substitutions (e.g., conservative substitutions), insertions, or deletions, relative to any of the amino acid sequences in (i); or
[0135] (iv) an amino acid sequence comprising at least one, two, or three but no more than four different amino acids, relative to any one of the amino acid sequences in (i).
   46. The isolated AAV particle of any one of embodiments 21 or 35-45, wherein [N1]-[N2]-[N3] is or comprises PLNGAVHLYAQAQ (SEQ ID NO: 4836).
   47. The isolated AAV particle of any one of embodiments 20-46, wherein the AAV capsid variant further comprises one, two, or all of an amino acid other than T at position 593 (e.g., V, L, R, S, A, C, I, K, M, N, P, or Q), an amino acid other than G at position 594 (e.g., S, A, T, M, V, Q, L, H, I, K, N, P, R, or Y), and/or an amino acid other than W at position 595 (e.g., S, P, G, A, Q, L, M, K, C, E, F, H, R, T, V, or Y), relative to a reference sequence numbered according to the amino acid sequence of SEQ ID NO: 138.
   48. The isolated AAV particle of any one of embodiments 20-47, wherein the AAV capsid variant further comprises one, two, or all of an amino acid other than T at position 600 (e.g., V, L, R, S, A, C, I, K, M, N, P, or Q), an amino acid other than G at position 601 (e.g., S, A, T, M, V, Q, L, H, I, K, N, P, R, or Y), and/or an amino acid other than W at position 602 (e.g., S, P, G, A, Q, L, M, K, C, E, F, H, R, T, V, or Y), relative to a reference sequence numbered according to the amino acid sequence of SEQ ID NO: 5, 8, or 3636.
   49. The isolated AAV particle of any one of embodiments 20-48, wherein the AAV capsid variant further comprises one, two, or all of:
[0136] (i) the amino acid V, L, R, S, A, C, I, K, M, N, P, or Q (e.g., L) at position 593 numbered according to SEQ ID NO: 138 or at position 600 numbered according to SEQ ID NO: 5, 8, or 3636);
[0137] (ii) the amino acid S, A, T, M, V, Q, L, H, I, K, N, P, R, or Y (e.g., S) at position 594 numbered according to SEQ ID NO: 138, or at position 601 numbered according to SEQ ID NO: 5, 8, or 3636; and/or
[0138] (iii) the amino acid S, P, G, A, Q, L, M, K, C, E, F, H, R, T, V, or Y (e.g. P) at position 595 numbered according to SEQ ID NO: 138 or at position 602 numbered according to SEQ ID NO: 5, 8, or 3636).
   50. The isolated AAV particle of any one of embodiments 20-49, wherein the AAV capsid variant further comprises:
[0139] (i) the amino acid L at position 593 numbered according to SEQ ID NO: 138 or at position 600 numbered according to SEQ ID NO: 5, 8, or 3636;
[0140] (ii) the amino acid S at position 594 numbered according to SEQ ID NO: 138, or at position 601 numbered according to SEQ ID NO: 5, 8, or 3636; and
[0141] (iii) the amino acid P at position 595 numbered according to SEQ ID NO: 138 or at position 602 numbered according to SEQ ID NO: 5, 8, or 3636.
   51. The isolated AAV particle of any one of embodiments 20-46, wherein the AAV capsid variant further comprises:
[0142] (i) T at position 593, G at position 594, and/or W at position 595, numbered according to SEQ ID NO: 138;
[0143] (ii) T at position 600, G at position 601, and/or W at position 602, numbered according to SEQ ID NO: 5, 8, or 3636.
   52. The isolated AAV particle of any one of embodiments 20 or 22-51, wherein the AAV capsid variant further comprises [N4], wherein [N4] comprises X10, X11, and X12, wherein:
[0144] (a) position X10 is: T, V, L, R, S, A, C, I, K, M, N, P, or Q;
[0145] (b) position X11 is: G, S, A, T, M, V, Q, L, H, I, K, N, P, R, or Y; and
[0146] (c) position X12 is: W, S, P, G, A, Q, L, M, K, C, E, F, H, R, T, V, or Y; and/or
[0147] an amino acid modification, e.g., a conservative substitution, of any of the aforesaid amino acids in (a)-(c).
   53. The isolated AAV particle of embodiment 52, wherein:
[0148] (a) position X10 is: T, V, L, A, R, C, S, I, M, N, P, Q;
[0149] (b) position X11 is: G, A, S, T, M, Q, V; and/or
[0150] (c) position X12 is: P, S, W, G, A, Q, T, K, N, R, L, M, H, V, C, or E.
   54. The isolated AAV particle of any one of embodiments 52 or 53, wherein [N4] comprises LS, TG, LA, LT, SA, SS, TL, TT, TS, TA, TV, VS, AA, AG, AS, AT, CS, CT, IA, IG, IL, IQ, IS, IT, LG, LH, LK, LM, LN, LQ, MA, NA, NM, NS, NT, NV, QA, RA, RG, RI, RL, RM, RN, RQ, RS, RT, RV, SG, SM, ST, SV, TK, TM, TN, TP, TQ, TR, VA, VG, VH, VK, VL, VM, VN, VQ, VR, VT, PG, LV, SP, GW, AP, GR, AL, AW, GG, GS, GP, QP, QS, AH, AN, AQ, AR, GQ, HP, KS, MG, MP, MQ, MS, NP, QQ, QR, SH, SK, SQ, SR, IP, VE, AK, AM, AV, GA, GC, GT, KA, KP, KQ, LP, MK, MN, MT, NQ, PP, QH, QK, QM, QN, QT, RW, SL, VW, GK, GN, NG, RP, SN, GL, or VP.
   55. The isolated AAV particle of any one of embodiments 21 or 52-54, wherein [N4] is or comprises TGW, TGL, TGS, TGG, TAW, TGR, TAS, LSS, TSS, SSL, SSS, TLS, TVS, VSS, TSP, VSP, TMS, LSP, VAS, TAL, US, TLP, VLP, RGW, LSG, LAS, SSP, LLP, STS, TSA, TTP, SAL, LGS, VTP, VSA, IGW, TGF, LTP, TLA, LSA, TVG, TAP, TMP, TSL, VQS, SSM, SLP, VSQ, RSS, TST, VMS, UA, TQP, LST, LAP, TVA, RLS, TGY, TSG, TAG, VMP, TSQ, TMA, VGS, TSW, TGV, TGT, TLG, LMP, VQP, TGM, SMS, SQL, IGS, RSV, TAA, STP, LSQ, TAQ, TGP, ASP, VSG, SAP, TLQ, LQP, TAT, TGQ, ATS, IGG, VAA, TSM, TVW, TAM, TGA, VAT, QSP, TQA, VQA, RSP, LAT, VAQ, LAA, RST, RTL, LGT, LMS, LGP, RTS, SQP, VLG, SVS, TMQ, SAV, LAG, SGP, TNS, RLT, TTQ, SAA, TSV, RLG, RAS, STQ, CSP, SAG, ALP, VTS, ISP, SVG, LTS, TTT, RSG, TQL, LNP, TVQ, IAS, LAQ, LSR, LSN, TTG, TSN, SMA, TKS, SVA, TQQ, VQQ, RLP, SAM, TAV, TQW, SSR, TQT, VNS, RSA, LMG, RQS, LVG, VTA, RU, SMG, VMA, TKP, SAQ, NSP, ATP, VAG, RGS, VKP, RMS, NLP, NAL, RTP, RQL, VQG, VTG, VST, NAS, RVE, ATG, AMS, RNS, VMQ, SMQ, LQQ, TMG, LGQ, TSH, AAP, RSQ, TYS, ITP, VAK, TQM, TKA, SQQ, ISG, VSR, RTA, RML, SQM, VAN, CTP, ISS, AGP, TAK, RTG, LHP, TMT, AQP, QAP, RQP, LKS, NTT, TSK, RYS, KSS, NTP, VGG, IAA, LMA, MAP, VHP, VLS, LAN, ATQ, TNA, TAN, VSN, AAA, AVG, LTA, SAN, RAG, RQG, TLR, LSH, SAF, RAA, IQP, ILG, VNG, SVQ, LSK, TNG, RTQ, TMN, RGG, UR, VRP, VKA, LAR, NQP, TMK, TYA, TQK, UK, IAG, TQN, LAH, NTQ, RQQ, RAQ, TKQ, TQH, TNQ, LMQ, VNA, VQT, TQR, VGK, VKQ, IQS, LQR, TMM, VGN, RIG, SAK, RIA, VQN, NVQ, RIP, NAQ, NMQ, TPS, LTN, VTK, PGW, LPP, SPP, TPA, TGC, VPP, TPT, TPW, TPP, RPP, TPQ, TPR, TPG, VPA, VPQ, RPG, KGW, TRW, TAR, IPP, RSL, LVP, KGS, VAP, KGG, KAW, PGS, TRL, or AGW.
   56. The isolated AAV particle of any one of embodiments 21 or 52-55, wherein [N4] is or comprises LSP, TGW, LAA, LTP, SAP, SSP, TGR, TLA, US, TSP, TAL, TAW, TGG, TGS, TVS, VSP, VSS, AAP AGP, ASP, ATP, CSP, CTP, IAA, IAG, IAS, IGG, IGS, ILG, IQP, IQS, ISG, ISP, ISS, ITP, LAG, LAH, LAN, LAP, LAQ, LAR, LAS, LAT, LGP, LGQ, LGS, LHP, LKS, LMA, LMG, LMP, LMQ, LMS, LNP, LQP, LQQ, LQR, LSH, LSK, LSQ, LSR, LST, LTA, LTN, LTS, MAP, NAQ, NAS, NMQ, NSP, NTP, NVQ, QAP, RAA, RAQ, RAS, RGG, RGS, RIA, RIG, RIP, RLG, RLS, RMS, RNS, RQP, RSA, RSG, RSP, RSQ, RSS, RST, RTA, RTG, RTL, RTS, RU, RVE, SAA, SAK, SAM, SAQ, SGP, SMA, SMG, SMQ, SMS, STP, SVA, SVG, TAA, TAG, TAK, TAM, TAN, TAP, TAQ, TAS, TAT, TAV, TGA, TGC, TGP, TGT, TKA, TKP, TKQ, TKS, TLP, TLQ, TMA, TMG, TMK, TMN, TMP, TMQ, TMS, TMT, TNA, TNQ, TNS, TPP, TQH, TQK, TQM, TQN, TQP, TQQ, TQT, TRW, TSA, TSG, TSH, TSK, TSL, TSM, TSQ, TSS, TST, TSV, UA, TTG, TTK, UP, TTQ, TIT, TVA, TVG, TVQ, TVW, VAA, VAG, VAK, VAN, VAQ, VAS, VAT, VGG, VGK, VGN, VGS, VHP, VKA, VKP, VKQ, VLP, VLS, VMA, VMQ, VMS, VNA, VNG, VNS, VQA, VQN, VQP, VQQ, VQS, VQT, VRP, VSA, VSG, VSN, VSQ, VSR, VST, VTA, VTG, VTK, VTP, VTS, TGL, PGW, LSG, LSS, or LVP.
   57. The isolated AAV particle of any one of embodiments 21 or 52-57, wherein [N4] is or comprises TGW.
   58. The isolated AAV particle of any one of embodiments 21 or 52-57, wherein [N4] is or comprises LSP.
   59. The isolated AAV particle of any one of embodiments 20-58, wherein the AAV capsid variant further comprises one, two, or all of an amino acid other than V at position 596 (e.g., D, F, G, L, A, E, or I), an amino acid other than Q at position 597 (e.g., K, R, H, E, L, or P), and/or an amino acid other than N at position 598 (e.g., T, K, H, D, Y, S, I, or P), relative to a reference sequence numbered according to the amino acid sequence of SEQ ID NO: 138.
   60. The isolated AAV particle of any one of embodiments 20-59, wherein the AAV capsid variant further comprises one, two, or all of an amino acid other than V at position 603 (e.g., D, F, G, L, A, E, or I), an amino acid other than Q at position 604 (e.g., K, R, H, E, L, or P), and/or an amino acid other than N at position 605 (e.g., T, K, H, D, Y, S, I, or P), relative to a reference sequence numbered according to the amino acid sequence of SEQ ID NO: 5, 8, or 3636.
   61. The isolated AAV particle of any one of embodiments 20-60, wherein the AAV capsid variant further comprises one, two, or all of:
[0151] (i) the amino acid V, D, F, G, L, A, E, or I at position 596 numbered according to SEQ ID NO: 138 or at position 603 numbered according to SEQ ID NO: 5, 8, or 3636;
[0152] (ii) the amino acid K, R, H, E, L, or P at position 597 numbered according to SEQ ID NO: 138 or at position 604 numbered according to SEQ ID NO: 5, 8, or 3636; and/or
[0153] (iii) the amino acid N, T, K, H, D, Y, S, I, or P at position 598 numbered according to the amino acid sequence of SEQ ID NO: 138 or at position 605 numbered according to SEQ ID NO: 5, 8, or 3636.
   62. The isolated AAV particle of any one of embodiments 20-61, wherein the AAV capsid variant further comprises one, two, or all of:
[0154] (i) the amino acid V at position 5% numbered according to SEQ ID NO: 138 or at position 603 numbered according to SEQ ID NO: 5, 8, or 3636;
[0155] (ii) the amino acid K, P, E or H at position 597 numbered according to SEQ ID NO: 138 or at position 604 numbered according to SEQ ID NO: 5, 8, or 3636; and
[0156] (iii) the amino acid N at position 598 numbered according to the amino acid sequence of SEQ ID NO: 138 or at position 605 numbered according to SEQ ID NO: 5, 8, or 3636.
   63. The isolated AAV particle of any one of embodiments 20 or 22-62, wherein the AAV capsid variant further comprises [N5], wherein [N5] comprises X13, X14, and X15, wherein:
[0157] (a) position X13 is: V, D, F, G, L, A, E, or I;
[0158] (b) position X14 is: Q, K, R, H, E, L, or P; and
[0159] (c) position X15 is: N, T, K, H, D, Y, S, I, or P; and/or
   an amino acid modification, e.g., a conservative substitution, of any of the aforesaid amino acids in (a)-(c).
   64. The isolated AAV particle of embodiment 63, wherein:
[0160] (a) position X13 is: V, D, A, F, E, G, or L;
[0161] (b) position X14 is: Q, K, R, L, or P; and/or
[0162] (c) position X15 is: N, T, K, H, D, I, K, S, or P.
   65. The isolated AAV particle of embodiment 63 or 64, wherein position X14 is P.
   66. The isolated AAV particle of embodiment 63 or 64, wherein position X14 is K.
   67. The isolated AAV particle of embodiment 63 or 64, wherein position X14 is E or H.
   68. The isolated AAV particle of embodiment 47 or 48, wherein position X14 is Q.
   69. The isolated AAV particle of any one of embodiments 63-68, wherein [N5] comprises VQ, AQ, DQ, FQ, VL, LQ, EQ, GQ, VP, VR, VK, QN, QS, QT, QK, QH, LN, QI, PN, QD, QP, RN, or KN.
   70. The isolated AAV particle of any one of embodiments 21 or 63-69, wherein [N5] is or comprises VQN, VKN, VQT, VQK, DQN, VQH, GQN, VQI, VHN, FQN, LQN, VLN, VRN, VQS, VQY, AQN, VEN, VQD, VPN, IQN, VKK, DKN, VKT, VQP, EQN, GQT, FQK, GHN, or VPH.
   71. The isolated AAV particle of any one of embodiments 21 or 63-70, wherein [N5] is or comprises VQN, AQN, VQS, DQN, VQT, VQK, VQH, FQN, VLN, LQN, VQI, EQN, GQT, VPN, VQD, VQP, VRN, or VKN.
   72. The isolated AAV particle of any one of embodiments 21 or 63-71, wherein [N5] is or comprises VKN, VPN, VEN, or VHN.
   73. The isolated AAV particle of any one of embodiments 21 or 63-71, wherein [N5] is or comprises VQN.
   74. The isolated AAV particle of any one of embodiments 21 or 63-73, wherein [N4]-[N5] is or comprises:

(i)
(SEQ ID NO: 4851)
TGWVQN,
(SEQ ID NO: 4852)
LAAVQN,
(SEQ ID NO: 4853)
LTPVQN,
(SEQ ID NO: 4854)
SAPVQN,
(SEQ ID NO: 4855)
SSPVQN,
(SEQ ID NO: 4856)
TGRVQN,
(SEQ ID NO: 4857)
TGWAQN,
(SEQ ID NO: 4858)
TGWVQS,
(SEQ ID NO: 4859)
TLAVQN,
(SEQ ID NO: 4860)
TTSVQN,
(SEQ ID NO: 4861)
TSPVQN,
(SEQ ID NO: 4862)
TALVQN,
(SEQ ID NO: 4863)
TAWVQN,
(SEQ ID NO: 4864)
TGGVQN,
(SEQ ID NO: 4865)
TGSVQN,
(SEQ ID NO: 4866)
TGWDQN,
(SEQ ID NO: 4867)
TVSVQN,
(SEQ ID NO: 4868)
VSPVQN,
(SEQ ID NO: 4869)
VSSVQN,
(SEQ ID NO: 4870)
AAPVQN,
(SEQ ID NO: 4871)
AGPVQN,
(SEQ ID NO: 4872)
ASPVQN,
(SEQ ID NO: 4873)
ATPVQN,
(SEQ ID NO: 4874)
CSPVQN,
(SEQ ID NO: 4875)
CTPVQN,
(SEQ ID NO: 4876)
IAAVQN,
(SEQ ID NO: 4877)
IAGVQN,
(SEQ ID NO: 4878)
IASVQN,
(SEQ ID NO: 4879)
IGGVQN,
(SEQ ID NO: 4880)
IGSVQN,
(SEQ ID NO: 4881)
ILGVQN,
(SEQ ID NO: 4882)
IQPVQN,
(SEQ ID NO: 4883)
IQSVQN,
(SEQ ID NO: 4884)
ISGVQN,
(SEQ ID NO: 4885)
ISPVQN,
(SEQ ID NO: 4886)
ISSVQN,
(SEQ ID NO: 4887)
ITPVQN,
(SEQ ID NO: 4888)
LAGVQN,
(SEQ ID NO: 4889)
LAHVQN,
(SEQ ID NO: 4890)
LANVQN,
(SEQ ID NO: 4891)
LAPVQN,
(SEQ ID NO: 4892)
LAPVQT,
(SEQ ID NO: 4893)
LAQVQN,
(SEQ ID NO: 4894)
LARVQN,
(SEQ ID NO: 4895)
LASVQN,
(SEQ ID NO: 4896)
LATVQN,
(SEQ ID NO: 4897)
LGPVQN,
(SEQ ID NO: 4898)
LGQVQN,
(SEQ ID NO: 4899)
LGSVQN,
(SEQ ID NO: 4900)
LHPVQN,
(SEQ ID NO: 4901)
LKSVQN,
(SEQ ID NO: 4902)
LMAVQN,
(SEQ ID NO: 4903)
LMGVQN,
(SEQ ID NO: 4904)
LMPVQN,
(SEQ ID NO: 4905)
LMQVQN,
(SEQ ID NO: 4906)
LMSVQN,
(SEQ ID NO: 4907)
LNPVQN,
(SEQ ID NO: 4908)
LQPVQN,
(SEQ ID NO: 4909)
LQQVQN,
(SEQ ID NO: 4910)
LQRVQN,
(SEQ ID NO: 4911)
LSHVQN,
(SEQ ID NO: 4912)
LSKVQN,
(SEQ ID NO: 4913)
LSPVQK,
(SEQ ID NO: 4914)
LSPVQN,
(SEQ ID NO: 4915)
LSQVQN,
(SEQ ID NO: 4916)
LSRVQN,
(SEQ ID NO: 4917)
LSTVQN,
(SEQ ID NO: 4918)
LTAVQN,
(SEQ ID NO: 4919)
LTNVQN,
(SEQ ID NO: 4920)
LTSVQN,
(SEQ ID NO: 4921)
MAPVQN,
(SEQ ID NO: 4922)
NAQVQN,
(SEQ ID NO: 4923)
NASVQN,
(SEQ ID NO: 4924)
NMQVQN,
(SEQ ID NO: 4925)
NSPVQN,
(SEQ ID NO: 4926)
NTPVQN,
(SEQ ID NO: 4927)
NVQVQN,
(SEQ ID NO: 4928)
QAPVQN,
(SEQ ID NO: 4929)
RAAVQN,
(SEQ ID NO: 4930)
RAQVQN,
(SEQ ID NO: 4931)
RASVQN,
(SEQ ID NO: 4932)
RGGVQN,
(SEQ ID NO: 4933)
RGSVQN,
(SEQ ID NO: 4934)
RIAVQN,
(SEQ ID NO: 4935)
RIGVQN,
(SEQ ID NO: 4936)
RIPVQN,
(SEQ ID NO: 4937)
RLGVQN,
(SEQ ID NO: 4938)
RLSVQN,
(SEQ ID NO: 4939)
RMSVQN,
(SEQ ID NO: 4940)
RNSVQN,
(SEQ ID NO: 4941)
RQPVQN,
(SEQ ID NO: 4942)
RSAVQN,
(SEQ ID NO: 4943)
RSGVQN,
(SEQ ID NO: 4944)
RSPVQN,
(SEQ ID NO: 4945)
RSQVQN,
(SEQ ID NO: 4946)
RSSVQN,
(SEQ ID NO: 4947)
RSTVQN,
(SEQ ID NO: 4948)
RTAVQN,
(SEQ ID NO: 4949)
RTGVQN,
(SEQ ID NO: 4950)
RTLVQN,
(SEQ ID NO: 4951)
RTSVQN,
(SEQ ID NO: 4952)
RTTVQN,
(SEQ ID NO: 4953)
RVEVQN,
(SEQ ID NO: 4954)
SAAVQN,
(SEQ ID NO: 4955)
SAKVQN,
(SEQ ID NO: 4956)
SAMVQN,
(SEQ ID NO: 4957)
SAQVQN,
(SEQ ID NO: 4958)
SGPVQN,
(SEQ ID NO: 4959)
SMAVQN,
(SEQ ID NO: 4960)
SMGVQN,
(SEQ ID NO: 4961)
SMQVQN,
(SEQ ID NO: 4962)
SMSVQN,
(SEQ ID NO: 4963)
STPVQN,
(SEQ ID NO: 4964)
SVAVQN,
(SEQ ID NO: 4965)
SVGVQN,
(SEQ ID NO: 4966)
TAAVQN,
(SEQ ID NO: 4967)
TAGVQN,
(SEQ ID NO: 4968)
TAKVQN,
(SEQ ID NO: 4969)
TAMVQN,
(SEQ ID NO: 4970)
TANVQN,
(SEQ ID NO: 4971)
TAPVQN,
(SEQ ID NO: 4972)
TAPVQT,
(SEQ ID NO: 4973)
TAQVQN,
(SEQ ID NO: 4974)
TASVQN,
(SEQ ID NO: 4975)
TASVQT,
(SEQ ID NO: 4976)
TATVQN,
(SEQ ID NO: 4977)
TAVVQN,
(SEQ ID NO: 4978)
TAWDQN,
(SEQ ID NO: 4979)
TAWVQH,
(SEQ ID NO: 4980)
TAWVQT,
(SEQ ID NO: 4981)
TGAVQN,
(SEQ ID NO: 4982)
TGCFQN,
(SEQ ID NO: 4983)
TGGAQN,
(SEQ ID NO: 4984)
TGGFQN,
(SEQ ID NO: 4985)
TGGVLN,
(SEQ ID NO: 4986)
TGGVQH,
(SEQ ID NO: 4987)
TGGVQK,
(SEQ ID NO: 4988)
TGGVQT,
(SEQ ID NO: 4989)
TGPVQN,
(SEQ ID NO: 4990)
TGSAQN,
(SEQ ID NO: 4991)
TGSLQN,
(SEQ ID NO: 4992)
TGSVQH,
(SEQ ID NO: 4993)
TGSVQI,
(SEQ ID NO: 4994)
TGSVQS,
(SEQ ID NO: 4995)
TGSVQT,
(SEQ ID NO: 4996)
TGTVQN,
(SEQ ID NO: 4997)
TGWEQN,
(SEQ ID NO: 4998)
TGWFQN,
(SEQ ID NO: 4999)
TGWGQT,
(SEQ ID NO: 5000)
TGWVPN,
(SEQ ID NO: 5001)
TGWVQD,
(SEQ ID NO: 5002)
TGWVQP,
(SEQ ID NO: 5003)
TGWVQT,
(SEQ ID NO: 5004)
TGWVRN,
(SEQ ID NO: 5005)
TKAVQN,
(SEQ ID NO: 5006)
TKPVQN,
(SEQ ID NO: 5007)
TKQVQN,
(SEQ ID NO: 5008)
TKSVQN,
(SEQ ID NO: 5009)
TLPVQN,
(SEQ ID NO: 5010)
TLQVQN,
(SEQ ID NO: 5011)
TMAVQN,
(SEQ ID NO: 5012)
TMGVQN,
(SEQ ID NO: 5013)
TMKVQN,
(SEQ ID NO: 5014)
TMNVQN,
(SEQ ID NO: 5015)
TMPVQN,
(SEQ ID NO: 5016)
TMQVQN,
(SEQ ID NO: 5017)
TMSVKN,
(SEQ ID NO: 5018)
TMSVQN,
(SEQ ID NO: 5019)
TMSVQT,
(SEQ ID NO: 5020)
TMTVQN,
(SEQ ID NO: 5021)
TNAVQN,
(SEQ ID NO: 5022)
TNQVQN,
(SEQ ID NO: 5023)
TNSVQN,
(SEQ ID NO: 5024)
TPPVQN,
(SEQ ID NO: 5025)
TQHVQN,
(SEQ ID NO: 5026)
TQKVQN,
(SEQ ID NO: 5027)
TQMVQN,
(SEQ ID NO: 5028)
TQNVQN,
(SEQ ID NO: 5029)
TQPVQN,
(SEQ ID NO: 5030)
TQQVQN,
(SEQ ID NO: 5031)
TQTVQN,
(SEQ ID NO: 5032)
TRWDQN,
(SEQ ID NO: 5033)
TSAVQN,
(SEQ ID NO: 5034)
TSGVQN,
(SEQ ID NO: 5035)
TSHVQN,
(SEQ ID NO: 5036)
TSKVQN,
(SEQ ID NO: 5037)
TSLVQN,
(SEQ ID NO: 5038)
TSMVQN,
(SEQ ID NO: 5039)
TSPDQN,
(SEQ ID NO: 5040)
TSQVQN,
(SEQ ID NO: 5041)
TSSVQN,
(SEQ ID NO: 5042)
TSSVQT,
(SEQ ID NO: 5043)
TSTVQN,
(SEQ ID NO: 5044)
TSVVQN,
(SEQ ID NO: 5045)
TTAVQN,
(SEQ ID NO: 5046)
TTGVQN,
(SEQ ID NO: 5047)
TTKVQN,
(SEQ ID NO: 5048)
TTPVQN,
(SEQ ID NO: 5049)
TTPVQT,
(SEQ ID NO: 5050)
TTQVQN,
(SEQ ID NO: 5051)
TTTVQN,
(SEQ ID NO: 5052)
TVAVQN,
(SEQ ID NO: 5053)
TVAVQT,
(SEQ ID NO: 5054)
TVGVQN,
(SEQ ID NO: 5055)
TVQVQN,
(SEQ ID NO: 5056)
TVSVKN,
(SEQ ID NO: 5057)
TVWVQK,
(SEQ ID NO: 5058)
VAAVQN,
(SEQ ID NO: 5059)
VAGVQN,
(SEQ ID NO: 5060)
VAKVQN,
(SEQ ID NO: 5061)
VANVQN,
(SEQ ID NO: 5062)
VAQVQN,
(SEQ ID NO: 5063)
VASVQN,
(SEQ ID NO: 5064)
VATVQN,
(SEQ ID NO: 5065)
VGGVQN,
(SEQ ID NO: 5066)
VGKVQN,
(SEQ ID NO: 5067)
VGNVQN,
(SEQ ID NO: 5068)
VGSVQN,
(SEQ ID NO: 5069)
VHPVQN,
(SEQ ID NO: 5070)
VKAVQN,
(SEQ ID NO: 5071)
VKPVQN,
(SEQ ID NO: 5072)
VKQVQN,
(SEQ ID NO: 5073)
VLPVQN,
(SEQ ID NO: 5074)
VLSVQN,
(SEQ ID NO: 5075)
VMAVQN,
(SEQ ID NO: 5076)
VMQVQN,
(SEQ ID NO: 5077)
VMSVQN,
(SEQ ID NO: 5078)
VNAVQN,
(SEQ ID NO: 5079)
VNGVQN,
(SEQ ID NO: 5080)
VNSVQN,
(SEQ ID NO: 5081)
VQAVQN,
(SEQ ID NO: 5082)
VQNVQN,
(SEQ ID NO: 5083)
VQPVQN,
(SEQ ID NO: 5084)
VQQVQN,
(SEQ ID NO: 5085)
VQSVQN,
(SEQ ID NO: 5086)
VQTVQN,
(SEQ ID NO: 5087)
VRPVQN,
(SEQ ID NO: 5088)
VSAVQN,
(SEQ ID NO: 5089)
VSGVQN,
(SEQ ID NO: 5090)
VSNVQN,
(SEQ ID NO: 5091)
VSPVQT,
(SEQ ID NO: 5092)
VSQVQN,
(SEQ ID NO: 5093)
VSRVQN,
(SEQ ID NO: 5094)
VSSVQK,
(SEQ ID NO: 5095)
VSSVQT,
(SEQ ID NO: 5096)
VSTVQN,
(SEQ ID NO: 5097)
VTAVQN,
(SEQ ID NO: 5098)
VTGVQN,
(SEQ ID NO: 5099)
VTKVQN,
(SEQ ID NO: 5100)
VTPVQN,
(SEQ ID NO: 5101)
VTSVQN,
(SEQ ID NO: 5102)
TGLVQN,
(SEQ ID NO: 5103)
TGWVKN,
(SEQ ID NO: 5104)
PGWVQN,
(SEQ ID NO: 5105)
TGWVQH,
(SEQ ID NO: 5106)
LSGVQN,
(SEQ ID NO: 5107)
LSSVQN,
or
(SEQ ID NO: 5108)
LVPVQN;

[0163] (ii) an amino acid sequence comprising any portion of an amino acid sequence in (i), e.g., any 2, 3, 4, or 5 amino acids, e.g., consecutive amino acids, thereof;
[0164] (iii) an amino acid sequence comprising at least one, two, or three but no more than four modifications, e.g., substitutions (e.g., conservative substitutions), insertions, or deletions, relative to any of the amino acid sequences in (i); or
[0165] (iv) an amino acid sequence comprising at least one, two, or three but no more than four different amino acids, relative to any one of the amino acid sequences in (i).
   75. The isolated AAV particle of any one of embodiments 21 or 63-74, wherein [N4]-[N5] is or comprises TGWVQN (SEQ ID NO: 4851), LSPVKN (SEQ ID NO: 5109), or TGWVPN (SEQ ID NO: 5000).
   76. The isolated AAV particle of embodiment 21-75, wherein:
[0166] (i) [N1] is or comprises: PLNGA (SEQ ID NO: 3679), QLNGA (SEQ ID NO: 4685), PLDGA (SEQ ID NO: 4691), PLDSS (SEQ ID NO: 4705), ALNGA (SEQ ID NO: 4686), PLNGS (SEQ ID NO: 4687), PLNGG (SEQ ID NO: 4689), SLNGA (SEQ ID NO: 4684), PLNGN (SEQ ID NO: 4693), PLNGT (SEQ ID NO: 4690), ALDGA (SEQ ID NO: 4698), PLDSA (SEQ ID NO: 4701), SLDGA (SEQ ID NO: 4694), TLNGA (SEQ ID NO: 4708), or PINGA (SEQ ID NO: 4697);
[0167] (ii) [N2] is or comprises: VHLY (SEQ ID NO: 4680), VHHY (SEQ ID NO: 4683), VHVY (SEQ ID NO: 4682), or VHIY (SEQ ID NO: 4681);
[0168] (iii) [N3] is or comprises: AQAQ (SEQ ID NO: 4737), AQPQ (SEQ ID NO: 4739), AKAQ (SEQ ID NO: 4741), DQAQ (SEQ ID NO: 4744), or SQAQ (SEQ ID NO: 4738);
[0169] (iv) [N4] is or comprises: TGW, LSP, TMS, TTK, TGS, TTS, TSP, TMK, VAQ, TGG, TAW, VKQ, SAP, LSK, LAP, LAQ, VAS, TAK, SAK, TGC, TQK, TGR, TVA, SSP, UQ, TAQ, RIA, RAS, UP, LAS, LTP, STP, VSQ, TMQ, TSK, VSP, TVQ, VTA, RQP, ISG, VRP, LGP, TNQ, VQQ, VAN, AAP, RST, TMA, IQP, IAS, TVS, RGS, NSP, LQP, VTG, VMQ, SMA, VGK, IQS, CSP, LQR, TPP, VTK, AGP, LAR, UT, TLQ, VAK, RAA, TVG, LNP, LSQ, TKP, TNA, LAT, VTP, VQA, CTP, TAG, TSQ, TMN, TST, VKP, ASP, VAA, LKS, IAA, TAA, TKA, VSN, TAP, LMP, LHP, RAQ, LTN, RU, TSV, TLA, RMS, VGN, LMQ, TAT, VHP, ISS, TRW, TMT, RSS, PGW, RTG, VAT, VTS, VSS, TSS, TNS, VKA, SGP, TGP, TAM, TQP, TQQ, VSR, VLP, LGS, VSA, VLS, TQH, QAP, NAQ, ATP, VQP, UA, LAA, RSG, LMA, TMP, LAN, VST, SAQ, NTP, TGL, TLP, TAV, RLG, RTL, TQM, ITP, TVW, RSA, TAS, TMG, VQS, ISP, VGG, TAL, LAG, RTA, RSP, LAH, TSL, RLS, LMG, SMQ, TQT, VGS, VSG, VMA, IGG, IAG, LSH, VQT, RNS, TKQ, LGQ, NMQ, NVQ, RGG, VMS, UG, LSR, MAP, ILG, TGT, TSH, RIG, SAM, TSM, SMG, SMS, TSG, TGA, VNS, VAG, IGS, VNG, LSS, LTA, VQN, TKS, SVG, NAS, TSA, TAN, LTS, RSQ, RIP, LVP, RVE, SVA, LSG, LQQ, LST, SAA, RTS, TQN, VNA, or LMS; and/or
[0170] (v) [N5] is or comprises: VQN, VPN, VKN, DQN, VQH, FQN, VQD, VQS, VQT, VRN, AQN, VQP, VQK, EQN, VQI, LQN, GQT, or VLN.
   77. The isolated AAV particle of embodiment 21, wherein:
[0171] (i) [N1] is or comprises: SLNGA (SEQ ID NO: 4684), QLNGA (SEQ ID NO: 4685), ALNGA (SEQ ID NO: 4686), PLNGS (SEQ ID NO: 4687), PVNGA (SEQ ID NO: 4688), PLNGA (SEQ ID NO: 3679), PLNGG (SEQ ID NO: 4689), PLNGT (SEQ ID NO: 4690), PLDGA (SEQ ID NO: 4691), QLNGS (SEQ ID NO: 4692), PLNGN (SEQ ID NO: 4693), SLDGA (SEQ ID NO: 4694), HLNGA (SEQ ID NO: 4695), ALNGT (SEQ ID NO: 4696), PINGA (SEQ ID NO: 4697), ALDGA (SEQ ID NO: 4698), PLNCA (SEQ ID NO: 4699), PLNGQ (SEQ ID NO: 4700), PLDSA (SEQ ID NO: 4701), RLDGA (SEQ ID NO: 4702), QLNGN (SEQ ID NO: 4703), PLNGY (SEQ ID NO: 4704), or PLDSS (SEQ ID NO: 4705);
[0172] (ii) [N2] is or comprises: VHLY (SEQ ID NO: 4680) or VHVY (SEQ ID NO: 4682);
[0173] (iii) [N3] is or comprises: AQAQ (SEQ ID NO: 4737), SQAQ (SEQ ID NO: 4738), AQPQ (SEQ ID NO: 4739), or AQSQ (SEQ ID NO: 4740);
[0174] (iv) [N4] is or comprises: TGW, TGL, TGS, TGG, TAW, TGR, TAS, LSS, TSS, SSL, SSS, TLS, TVS, VSS, TSP, VSP, TMS, LSP, VAS, TAL, US, TLP, VLP, RGW, LSG, LAS, SSP, LLP, STS, TSA, TTP, SAL, LGS, VTP, VSA, IGW, TGF, LTP, TLA, LSA, TVG, TAP, TMP, TSL, VQS, SSM, SLP, VSQ, RSS, TST, VMS, TTA, TQP, LST, LAP, TVA, RLS, TGY, TSG, TAG, VMP, TSQ, TMA, VGS, TSW, TGV, TGT, TLG, LMP, VQP, TGM, SMS, SQL, IGS, RSV, TAA, STP, LSQ, TAQ, TGP, ASP, VSG, SAP, TLQ, LQP, TAT, TGQ, ATS, IGG, VAA, TSM, TVW, TAM, TGA, VAT, QSP, TQA, VQA, RSP, LAT, VAQ, LAA, RST, RTL, LGT, LMS, LGP, RTS, SQP, VLG, SVS, TMQ, SAV, LAG, SGP, TNS, RLT, TQ, SAA, TSV, RLG, RAS, STQ, CSP, SAG, ALP, VTS, ISP, SVG, LTS, TTT, RSG, TQL, LNP, TVQ, IAS, LAQ, LSR, LSN, TTG, TSN, SMA, TKS, SVA, TQQ, VQQ, RLP, SAM, TAV, TQW, SSR, TQT, VNS, RSA, LMG, RQS, LVG, VTA, RTT, SMG, VMA, TKP, SAQ, NSP, ATP, VAG, RGS, VKP, RMS, NLP, NAL, RTP, RQL, VQG, VTG, VST, NAS, RVE, ATG, AMS, RNS, VMQ, SMQ, LQQ, TMG, LGQ, TSH, AAP, RSQ, TYS, ITP, VAK, TQM, TKA, SQQ, ISG, VSR, RTA, RML, SQM, VAN, CTP, ISS, AGP, TAK, RTG, LHP, TMT, AQP, QAP, RQP, LKS, NTT, TSK, RYS, KSS, NTP, VGG, IAA, LMA, MAP, VHP, VLS, LAN, ATQ, TNA, TAN, VSN, AAA, AVG, LTA, SAN, RAG, RQG, TLR, LSH, SAF, RAA, IQP, ILG, VNG, SVQ, LSK, TNG, RTQ, TMN, RGG, TTR, VRP, VKA, LAR, NQP, TMK, TYA, TQK, UK, IAG, TQN, LAH, NTQ, RQQ, RAQ, TKQ, TQH, TNQ, LMQ, VNA, VQT, TQR, VGK, VKQ, IQS, LQR, TMM, VGN, RIG, SAK, RIA, VQN, NVQ, RIP, NAQ, NMQ, TPS, LTN, VTK, PGW, LPP, SPP, TPA, or TGC; and/or
[0175] (v) [N5] is or comprises: VQN, VKN, VQT, VQK, DQN, VQH, GQN, VQI, VHN, FQN, LQN, VLN, VRN, VQS, VQY, AQN, VEN, or VQD.
   78. The isolated AAV particle of any one of embodiments 20, 21, 32-35, 47-52, or 59-63, or 47, which comprises:
[0176] (i) the amino acid sequence of any of SEQ ID NOs: 139-1138;
[0177] (ii) an amino acid sequence comprising any portion of an amino acid sequence in (i), e.g., any 2, 3, 4, 5, 6, 7, 8, 9, 10, 11, 12, 13, 14, 15, 16, 17, or 18 amino acids, e.g., consecutive amino acids, thereof;
[0178] (iii) an amino acid sequence comprising at least one, two, or three but no more than four modifications, e.g., substitutions (e.g., conservative substitutions), insertions, or deletions, relative to any of the amino acid sequences in (i); or
[0179] (iv) an amino acid sequence comprising at least one, two, or three but no more than four different amino acids, relative to any one of the amino acid sequences in (i).
   79. The isolated AAV particle of any one of embodiments 20-76 or 78, which comprises:
[0180] (i) the amino acid sequence of any of SEQ ID NOs: 139-476;
[0181] (ii) an amino acid sequence comprising any portion of an amino acid sequence in (i), e.g., any 2, 3, 4, 5, 6, 7, 8, 9, 10, 11, 12, 13, 14, 15, 16, 17, or 18 amino acids, e.g., consecutive amino acids, thereof;
[0182] (iii) an amino acid sequence comprising at least one, two, or three but no more than four modifications, e.g., substitutions (e.g., conservative substitutions), insertions, or deletions, relative to any of the amino acid sequences in (i); or
[0183] (iv) an amino acid sequence comprising at least one, two, or three but no more than four different amino acids, relative to any one of the amino acid sequences in (i).
   80. An isolated, e.g., recombinant, AAV particle comprising an AAV capsid variant and a nucleic acid comprising a transgene encoding a β-glucocerebrosidase (GBA) protein, wherein the AAV capsid variant comprises one, two, three, four, or all of:
[0184] (i) an [N1], wherein [N1] is or comprises: PLNGA (SEQ ID NO: 3679), SLNGA (SEQ ID NO: 4684), QLNGA (SEQ ID NO: 4685), ALNGA (SEQ ID NO: 4686), PLNGS (SEQ ID NO: 4687), PVNGA (SEQ ID NO: 4688), PLNGG (SEQ ID NO: 4689), PLNGT (SEQ ID NO: 4690), PLDGA (SEQ ID NO: 4691), QLNGS (SEQ ID NO: 4692), PLNGN (SEQ ID NO: 4693), SLDGA (SEQ ID NO: 4694), HLNGA (SEQ ID NO: 4695), ALNGT (SEQ ID NO: 4696), PINGA (SEQ ID NO: 4697), ALDGA (SEQ ID NO: 4698), PLNCA (SEQ ID NO: 4699), PLNGQ (SEQ ID NO: 4700), PLDSA (SEQ ID NO: 4701), RLDGA (SEQ ID NO: 4702), QLNGN (SEQ ID NO: 4703), PLNGY (SEQ ID NO: 4704), or PLDSS (SEQ ID NO: 4705);
[0185] (ii) an [N2] wherein [N2] is or comprises: VHLY (SEQ ID NO: 4680) or VHVY (SEQ ID NO: 4682);
[0186] (iii) an [N3] wherein [N3] is or comprises: AQAQ (SEQ ID NO: 4737), SQAQ (SEQ ID NO: 4738), AQPQ (SEQ ID NO: 4739), or AQSQ (SEQ ID NO: 4740);
[0187] (iv) an [N4] wherein [N4] is or comprises: TGW, LSP, TGL, TGS, TGG, TAW, TGR, TAS, LSS, TSS, SSL, SSS, TLS, TVS, VSS, TSP, VSP, TMS, VAS, TAL, TTS, TLP, VLP, RGW, LSG, LAS, SSP, LLP, STS, TSA, TTP, SAL, LGS, VTP, VSA, IGW, TGF, LTP, TLA, LSA, TVG, TAP, TMP, TSL, VQS, SSM, SLP, VSQ, RSS, TST, VMS, TTA, TQP, LST, LAP, TVA, RLS, TGY, TSG, TAG, VMP, TSQ, TMA, VGS, TSW, TGV, TGT, TLG, LMP, VQP, TGM, SMS, SQL, IGS, RSV, TAA, STP, LSQ, TAQ, TGP, ASP, VSG, SAP, TLQ, LQP, TAT, TGQ, ATS, IGG, VAA, TSM, TVW, TAM, TGA, VAT, QSP, TQA, VQA, RSP, LAT, VAQ, LAA, RST, RTL, LGT, LMS, LGP, RTS, SQP, VLG, SVS, TMQ, SAV, LAG, SGP, TNS, RLT, TTQ, SAA, TSV, RLG, RAS, STQ, CSP, SAG, ALP, VTS, ISP, SVG, LTS, TIT, RSG, TQL, LNP, TVQ, IAS, LAQ, LSR, LSN, TTG, TSN, SMA, TKS, SVA, TQQ, VQQ, RLP, SAM, TAV, TQW, SSR, TQT, VNS, RSA, LMG, RQS, LVG, VTA, RU, SMG, VMA, TKP, SAQ, NSP, ATP, VAG, RGS, VKP, RMS, NLP, NAL, RTP, RQL, VQG, VTG, VST, NAS, RVE, ATG, AMS, RNS, VMQ, SMQ, LQQ, TMG, LGQ, TSH, AAP, RSQ, TYS, ITP, VAK, TQM, TKA, SQQ, ISG, VSR, RTA, RML, SQM, VAN, CTP, ISS, AGP, TAK, RTG, LHP, TMT, AQP, QAP, RQP, LKS, NTT, TSK, RYS, KSS, NTP, VGG, IAA, LMA, MAP, VHP, VLS, LAN, ATQ, TNA, TAN, VSN, AAA, AVG, LTA, SAN, RAG, RQG, TLR, LSH, SAF, RAA, IQP, ILG, VNG, SVQ, LSK, TNG, RTQ, TMN, RGG, TTR, VRP, VKA, LAR, NQP, TMK, TYA, TQK, UK, IAG, TQN, LAH, NTQ, RQQ, RAQ, TKQ, TQH, TNQ, LMQ, VNA, VQT, TQR, VGK, VKQ, IQS, LQR, TMM, VGN, RIG, SAK, RIA, VQN, NVQ, RIP, NAQ, NMQ, TPS, LTN, VTK, PGW, LPP, SPP, TPA, or TGC; and/or
[0188] (v) an [N5] wherein [N5] is or comprises: VQN, VKN, VQT, VQK, DQN, VQH, GQN, VQI, VHN, FQN, LQN, VLN, VRN, VQS, VQY, AQN, VEN, VQD; and/or wherein the AAV capsid variant comprises an amino acid modification, e.g., a conservative substitution, of any of the aforesaid amino acids in (i)-(v).
   81. The isolated AAV particle of embodiment 77 or 80, wherein the AAV capsid variant comprises:
[0189] (i) the amino acid sequence of any of SEQ ID NOs: 140, 142-144, 148-150, 154-158, 160, 161, 163, 165, 166, 168, 170, 171, 173-175, 177-179, 181, 182, 184-197, 199-214, 218-222, 224, 225, 227-241, 243-253, 255-262, 265, 267, 268, 270, 271, 273, 274, 276, 277, 279, 282, 284-286, 288-296, 300-310, 312, 315, 317, 318, 320-323, 326, 327, 331, 332, 334, 336, 337, 339, 340, 341, 343, 344, 346, 349, 351, 352, 356-363, 365-367, 369, 370, 372-376, 378-381, 383-389, 392, 393, 395, 397-400, 404, 407, 408, 411, 412, 415, 417, 420-430, 432, 433, 435-438, 441, 442, 446-448, 451-453, 456, 458, 460, 461, 465, 467-469, 471-473, 475, 476, 478, 480, 482, 485, 488, 490, 492, 493, 495, 498, 500-503, 505, 507, 509, 510, 517, 522-526, 528, 535-538, 540, 543-545, 547, 551, 552, 557, 559, 561, 564, 568, 570, 572-574, 577, 585-588, 592-594, 596, 601, 602, 605, 612, 616, 619, 622, 624, 627, 628, 635, 640, 641, 646, 658, 660, 665, 666, 675, 678, 680, 683, 684, 689, 693, 695, 707, 711, 718, 719, 724, 727, 735, 740, 748, 751, 755, 758, 759, 765, 766, 768, 778, 783, 787, 791, 797, 801, 804, 817, 821, 832, 841, 852, 856, 861, 862, 864, 894, 906, 911, 913, 924, 929, 945, 959, 961, 970, 975, 980, 983, 988, 992, 1009, 1015, 1019, 1027, 1032, 1036, 1038, 1047, 1051, 1061, 1077, 1081, 1095, or 1113;
[0190] (ii) an amino acid sequence comprising any portion of an amino acid sequence in (i), e.g., any 2, 3, 4, 5, 6, 7, 8, 9, 10, 11, 12, 13, 14, 15, 16, 17, or 18 amino acids, e.g., consecutive amino acids, thereof;
[0191] (iii) an amino acid sequence comprising at least one, two, or three but no more than four modifications, e.g., substitutions (e.g., conservative substitutions), insertions, or deletions, relative to any of the amino acid sequences in (i); or
[0192] (iv) an amino acid sequence comprising at least one, two, or three but no more than four different amino acids, relative to any one of the amino acid sequences in (i).
   82. The isolated AAV particle of any one of embodiments 21 or 63-80, wherein [N1]-[N2]-[N3]-[N4]-[N5] is or comprises the amino acid sequence of PLNGAVHLYAQAQTGWVPN (SEQ ID NO: 314).
   83. The isolated AAV particle of any one of embodiments 21 or 63-80, wherein [N1]-[N2]-[N3]-[N4]-[N5] is or comprises the amino acid sequence of PLNGAVHLYAQAQLSPVKN (SEQ ID NO: 566).
   84. The isolated AAV particle of any one of embodiments 21 or 63-81, wherein [N1]-[N2]-[N3]-[N4]-[N5] is or comprises the amino acid sequence of PLNGAVHLYAQAQTGWVQN (SEQ ID NO: 476).
   85. The isolated AAV particle of any one of embodiments 21 or 63-80, wherein [N1]-[N2]-[N3]-[N4]-[N5] is or comprises the amino acid sequence of:
[0193] (i) the amino acid sequence of any of SEQ ID NOs: 14-17, 40-136, 314, 325, 491, 499, 529, 558, 566, 576, 603, 610, 625, 631, 648, 649, 700, 703, 720, 755, 763, 765, 771, 791, 804, 816, 818, 819, 828, 859, 864, 871, 885, 946, 960, 966, 978, 979, 1016, 1033, 1032, 1037, 1058, 1081, 1100, 1122, or 1174-1193;
[0194] (ii) an amino acid sequence comprising any portion of an amino acid sequence in (i), e.g., any 2, 3, 4, 5, 6, 7, 8, 9, 10, 11, 12, 13, 14, 15, 16, 17, or 18 amino acids, e.g., consecutive amino acids, thereof;
[0195] (iii) an amino acid sequence comprising at least one, two, or three but no more than four modifications, e.g., substitutions (e.g., conservative substitutions), insertions, or deletions, relative to any of the amino acid sequences in (i); or
[0196] (iv) an amino acid sequence comprising at least one, two, or three but no more than four different amino acids, relative to any one of the amino acid sequences in (i).
   86. The isolated AAV particle of any one of embodiments 20-85, wherein [N1]-[N2] is present in loop VIII.
   87. The isolated AAV particle of any one of embodiments 21 or 63-86, wherein [N3], [N4], and/or [N5] is present in loop VIII.
   88. The isolated AAV particle of any one of embodiments 21 or 63-87, wherein [N1]-[N2]-[N3]-[N4]-[N5] is present in loop VIII.
   89. The isolated AAV particle of any one of embodiments 20-88, wherein the AAV capsid variant comprises an amino acid other than A at position 587 and/or an amino acid other than Q at position 588, numbered according to SEQ ID NO: 138.
   90. The isolated AAV particle of any one of embodiments 20-89, which comprises:
[0197] (i) the amino acid P, Q, A, H, K, L, R, S, or T (e.g., P, Q, A, S, or T) at position 587, numbered according to SEQ ID NO: 138 or 3636; and/or
[0198] (ii) the amino acid L, I, V, H, or R (e.g., L or I) at position 588, numbered according to SEQ ID NO: 5, 8, 138 or 3636.
   91. The isolated AAV particle of any one of embodiments 20-90, wherein [N1] is present immediately subsequent to position 586, relative to a reference sequence numbered according to the amino acid sequence of SEQ ID NO: 5, 8, 138, or 3636.
   92. The isolated AAV particle of any one of embodiments 20-91, wherein [N1] is present immediately subsequent to position 586, and replaces positions 587 and 588 (e.g., A587 and Q588), numbered according to the amino acid sequence of SEQ ID NO: 138.
   93. The isolated AAV particle of any one of embodiments 20-92, wherein [N1] replaces positions 587 and 588 (e.g., A587 and Q588), numbered according to the amino acid sequence of SEQ ID NO: 138.
   94. The isolated AAV particle of any one of embodiments 20-93, wherein [N1] corresponds to positions 587-591 of SEQ ID NO: 5, 8, or 3636.
   95. The isolated AAV particle of any one of embodiments 21 or 63-94, wherein [N1]-[N2]-[N3]-[N4]-[N5] is present immediately subsequent to position 586, numbered according to the amino acid sequence of SEQ ID NO: 5, 8, 138, or 3636.
   96. The isolated AAV particle of any one of embodiments 20-95, wherein [N2] is present immediately subsequent to [N1].
   97. The isolated AAV particle of any one of embodiments 20-96, wherein [N2] is present immediately subsequent to [N1], wherein [N1] is present immediately subsequent to position 586, relative to a reference sequence numbered according to the amino acid sequence of SEQ ID NO: 5, 8, 138, or 3636.
   98. The isolated AAV particle of any one of embodiments 20-97, wherein [N2] is present immediately subsequent to [N1], wherein [N1] is present immediately subsequent to position 586, relative to a reference sequence numbered according to the amino acid sequence of SEQ ID NO: 5, 8, 138, or 3636.
   99. The isolated AAV particle of any one of embodiments 20-98, wherein [N2] is present immediately subsequent to [N1], wherein [N1] is present immediately subsequent to position 586 and replaces positions 587 and 588 (e.g., A587 and Q588), numbered according to SEQ ID NO: 138.
   100. The isolated AAV particle of any one of embodiments 20-99, wherein [N2] corresponds to positions 592-595 of SEQ ID NO: 5, 8, or 3636.
   101. The isolated AAV particle of any one of embodiments 20-100, wherein [N1]-[N2] replaces positions 587 and 588 (e.g., A587 and Q588), numbered according to SEQ ID NO: 138.
   102. The isolated AAV particle of any one of embodiments 20-101, wherein [N1]-[N2] is present immediately subsequent to position 586, numbered according to SEQ ID NO: 138.
   103. The isolated AAV particle of any one of embodiments 20-102, wherein [N1]-[N2] is present immediately subsequent to position 586 and replaces positions 587 and 588 (e.g., A587 and Q588), numbered according to SEQ ID NO: 138.
   104. The isolated AAV particle of any one of embodiments 20-103, wherein [N1]-[N2] corresponds to positions 587-595 of SEQ ID NO: 5, 8, or 3636.
   105. The isolated AAV particle of any one of embodiments 21 or 35-104, wherein [N3] is present immediately subsequent to position 588, relative to a reference sequence numbered according to the amino acid sequence of SEQ ID NO: 138.
   106. The isolated AAV particle of any one of embodiments 21 or 35-105, wherein [N3] replaces positions 589-592 (e.g., A589, Q590, A591, Q592), numbered according to the amino acid sequence of SEQ ID NO: 138.
   107. The isolated AAV particle of any one of embodiments 21 or 35-106, wherein [N3] is present immediately subsequent to position 588, and replaces positions 589-592 (e.g., A589, Q590, A591, Q592), numbered according to the amino acid sequence of SEQ ID NO: 138.
   108. The isolated AAV particle of any one of embodiments 21 or 35-107, wherein [N3] corresponds to positions 596-599 of SEQ ID NO: 5, 8, or 3636.
   109. The isolated AAV particle of any one of embodiments 21 or 35-108, wherein [N1]-[N2]-[N3] is present immediately subsequent to position 586, numbered according to SEQ ID NO: 138.
   110. The isolated AAV particle of any one of embodiments 21 or 35-109, wherein [N1]-[N2]-[N3] replaces positions 587-592 (e.g., A587, Q588, A589, Q590, A591, Q592), numbered according to SEQ ID NO: 138.
   111. The isolated AAV particle of any one of embodiments 21 or 35-110, wherein [N1]-[N2]-[N3] is present immediately subsequent to position 586 and replaces positions 587-592 (e.g., A587, Q588, A589, Q590, A591, Q592), numbered according to SEQ ID NO: 138.
   112. The isolated AAV particle of any one of embodiments 21 or 31-111, wherein [N1]-[N2]-[N3] corresponds to positions 587-599 of SEQ ID NO: 5, 8, or 3636.
   113. The isolated AAV particle of any one of embodiments 21 or 52-112, wherein [N4] is present immediately subsequent to position 592, relative to a reference sequence numbered according to the amino acid sequence of SEQ ID NO: 138.
   114. The isolated AAV particle of any one of embodiments 21 or 52-113, wherein [N4] replaces positions 593-595 (e.g., T593, G594, W595), numbered according to the amino acid sequence of SEQ ID NO: 138.
   115. The isolated AAV particle of any one of embodiments 21 or 52-114, wherein [N4] is present immediately subsequent to position 592, and replaces positions 593-595 (e.g., T593, G594, W595), numbered according to the amino acid sequence of SEQ ID NO: 138.
   116. The isolated AAV particle of any one of embodiments 21 or 52-115, wherein [N4] corresponds to positions 600-602 of SEQ ID NO: 5, 8, or 3636.
   117. The isolated AAV particle of any one of embodiments 21 or 52-116, wherein [N3]-[N4] is present immediately subsequent to position 588, numbered according to SEQ ID NO: 138.
   118. The isolated AAV particle of any one of embodiments 21 or 52-117, wherein [N3]-[N4] replaces positions 589-595 (e.g., A589, Q590, A591, Q592, T593, G594, W595), numbered according to the amino acid sequence of SEQ ID NO: 138.
   119. The isolated AAV particle of any one of embodiments 21 or 52-118, wherein [N3]-[N4] is present immediately subsequent to 588, and replaces positions 589-595 (e.g., A589, Q590, A591, Q592, T593, G594, W595), numbered according to the amino acid sequence of SEQ ID NO: 138.
   120. The isolated AAV particle of any one of embodiments 21 or 52-119, wherein [N3]-[N4] corresponds to positions 5%-602 of SEQ ID NO: 5, 8, or 3636.
   121. The isolated AAV particle of any one of embodiments 21 or 52-120, wherein [N1]-[N2]-[N3]-[N4] is present immediately subsequent to position 586, numbered according to SEQ ID NO: 138.
   122. The isolated AAV particle of any one of embodiments 21 or 52-121, wherein [N1]-[N2]-[N3]-[N4] replaces positions 587-595 (e.g., A587, Q588, A589, Q590, A591, Q592, T593, G594, W595), numbered according to SEQ ID NO: 138.
   123. The isolated AAV particle of any one of embodiments 21 or 52-122, wherein [N1]-[N2]-[N3]-[N4] is present immediately subsequent to position 586 and replaces positions 587-595 (e.g., A587, Q588, A589, Q590, A591, Q592, T593, G594, W595), numbered according to SEQ ID NO: 138.
   124. The isolated AAV particle of any one of embodiments 21 or 52-123, wherein [N1]-[N2]-[N3]-[N4] corresponds to positions 587-602 of SEQ ID NO: 5, 8, or 3636.
   125. The isolated AAV particle of any one of embodiments 21 or 63-124, wherein [N5] is present immediately subsequent to position 595, relative to a reference sequence numbered according to the amino acid sequence of SEQ ID NO: 138.
   126. The isolated AAV particle of any one of embodiments 21 or 63-125, wherein [N5] replaces positions 596-598 (e.g., V596, Q597, N598), numbered according to the amino acid sequence of SEQ ID NO: 138.
   127. The isolated AAV particle of any one of embodiments 21 or 63-126, wherein [N5] is present immediately subsequent to position 595, and replaces positions 596-598 (e.g., V596, Q597, N598), numbered according to the amino acid sequence of SEQ ID NO: 138.
   128. The isolated AAV particle of any one of embodiments 21 or 63-127, wherein [N5] corresponds to positions 603-605 of SEQ ID NO: 5, 8, or 3636.
   129. The isolated AAV particle of any one of embodiments 21 or 63-128, wherein [N4]-[N5] corresponds to positions 600-605 of SEQ ID NO: 5, 8, or 3636.
   130. The isolated AAV particle of any one of embodiments 21 or 63-129, wherein [N1]-[N2]-[N3]-[N4]-[N5] replaces positions 587-598 (e.g., A587, Q588, A589, Q590, A591, Q592, T593, G594, W595, V596, Q597, N598), numbered according to SEQ ID NO: 138.
   131. The isolated AAV particle of any one of embodiments 21 or 63-130, wherein [N1]-[N2]-[N3]-[N4]-[N5] is present immediately subsequent to position 586 and replaces positions 587-598 (e.g., A587, Q588, A589, Q590, A591, Q592, T593, G594, W595, V596, Q597, N598), numbered according to SEQ ID NO: 138.
   132. The isolated AAV particle of any one of embodiments 21 or 63-131, wherein [N1]-[N2]-[N3]-[N4]-[N5] corresponds to positions 587-605 of SEQ ID NO: 5, 8, or 3636.
   133. The isolated AAV particle of any one of embodiments 20-132, wherein the AAV capsid variant comprises from N-terminus to C-terminus, [N1]-[N2].
   134. The isolated AAV particle of any one of embodiments 21 or 35-133, wherein the AAV capsid variant comprises from N-terminus to C-terminus, [N1]-[N2]-[N3].
   135. The isolated AAV particle of any one of embodiments 21 or 52-134, wherein the AAV capsid variant comprises from N-terminus to C-terminus, [N1]-[N2]-[N3]-[N4].
   136. The isolated AAV particle of any one of embodiments 21 or 63-135, wherein the AAV capsid variant comprises from N-terminus to C-terminus, [N1]-[N2]-[N3]-[N4]-[N5].
   137. An isolated, e.g., recombinant, AAV particle comprising an AAV capsid variant and a nucleic acid comprising a transgene encoding a β-glucocerebrosidase (GBA) protein, wherein the AAV capsid variant comprises [A][B], wherein [A] comprises the amino acid sequence of PLNGA (SEQ ID NO: 3679), and [B] comprises X1, X2, X3, X4, wherein:
[0199] (i) X1 is: V, I, L, A, F, D, or G;
[0200] (ii) X2 is: H, N, Q, P, D, L, R, or Y;
[0201] (iii) X3 is: L, H, I, R, or V; and
[0202] (iv) X4 is Y; and/or
[0203] wherein the AAV capsid variant comprises an amino acid modification, e.g., a conservative substitution, of any of the aforesaid amino acids in (i)-(iv);
[0204] optionally wherein the AAV capsid variant further comprises:
[0205] (a) one, two, or all of an amino acid other than T at position 593 (e.g., V, L, R, S, A, C, I, K, M, N, P, or Q), an amino acid other than G at position 594 (e.g., S, A, T, M, V, Q, L, H, I, K, N, P, R, or Y), and/or an amino acid other than W at position 595 (e.g., S, P, G, A, Q, L, M, K, C, E, F, H, R, T, V, or Y), relative to a reference sequence numbered according to the amino acid sequence of SEQ ID NO: 138; and/or
[0206] (b) one, two, or all of an amino acid other than V at position 596 (e.g., D, F, G, L, A, E, or I), an amino acid other than Q at position 597 (e.g., P, K, R, H, E, or L), and/or an amino acid other than N at position 598 (e.g., T, K, H, D, Y, S, I, or P), relative to a reference sequence numbered according to the amino acid sequence of SEQ ID NO: 138;
[0207] (c) the amino acid L, T, V, R, S, A, C, I, K, M, N, P, or Q at position 600, the amino acid S, G, A, T, M, V, Q, L, H, I, K, N, P, R, or Y at position 601, and the amino P, W, S, G, A, Q, L, M, K, C, E, F, H, R, T, V, or Y at position 602, numbered according to the amino acid sequence of SEQ ID NO: 5, 8, 3636, wherein the AAV capsid variant does not comprise the amino acid sequence TGW at position 600-602, numbered according to SEQ ID NO: 5, 8, or 3636; and/or
[0208] (d) the amino acid V, D, F, G, L, A, E, or I at position 603, the amino acid K, P, Q, R, H, E, or L at position 604, and the amino acid N, T, K, H, D, Y, S, I, or P, numbered according to the amino acid sequence of SEQ ID NO: 5, 8, or 3636, wherein the AAV capsid variant does not comprise the amino acid sequence VQN at position 603-605, numbered according to SEQ ID NO: 5, 8, or 3636; and/or (e) one, two, three, four, or all of an amino acid other then P at position X1, an amino acid other than L at position X2, an amino acid other than N at position X3, an amino acid other than G at position X4, or an amino acid other than A at position X5.
   138. The isolated AAV particle of embodiment 137, wherein:
[0209] (i) X1 is V;
[0210] (ii) X2 is H;
[0211] (iii) X3 is L, H, or I; and
[0212] (iv) X4 is Y.
   139. The isolated AAV particle of embodiment 137 or 138, wherein [B] comprises:
[0213] (i) VH, VN, VQ, IH, LH, VP, VD, AH, FH, DH, VL, GH, VR, VY, LY, HY, IY, RY, HL, HH, HI, NL, QL, PL, DL, HR, LL, RL, HV, or YL; or
[0214] (ii) VH, LY, HY, IY, HL, HH, or HI.
   140. The isolated AAV particle of any one of embodiments 137-139, wherein [B] comprises:
[0215] (i) VHL, VHH, VHI, VNL, VQL, IHL, LHL, VPL, VDL, AHL, VHR, FHL, DHL, VLL, GHL, VRL, VHV, VYL, HLY, HHY, HIY, NLY, QLY, PLY, DLY, HRY, LLY, RLY, HVY, YLY;
[0216] (ii) VHL, VHH, VHI, HLY, HHY, or HIY.
   141. The isolated AAV particle of any one of embodiments 137-140, wherein [B] is:
[0217] (i) VHLY (SEQ ID NO: 4680), VHHY (SEQ ID NO: 4683), VHIY (SEQ ID NO: 4681), VNLY (SEQ ID NO: 4724), VQLY (SEQ ID NO: 4729), IHLY (SEQ ID NO: 4730), LHLY (SEQ ID NO: 4727), VPLY (SEQ ID NO: 4723), VDLY (SEQ ID NO: 4731), AHLY (SEQ ID NO: 4732), VHRY (SEQ ID NO: 4725), FHLY (SEQ ID NO: 4726), DHLY (SEQ ID NO: 4728), VLLY (SEQ ID NO: 4733), GHLY (SEQ ID NO: 4734), VRLY (SEQ ID NO: 4735), VHVY (SEQ ID NO: 4682), or VYLY (SEQ ID NO: 4736); or
[0218] (ii) VHLY (SEQ ID NO: 4680), VHHY (SEQ ID NO: 4683), or VHIY (SEQ ID NO: 4681).
   142. The isolated AAV particle of any one of embodiments 137-141, wherein [B] is or comprises VHLY (SEQ ID NO: 4680).
   143. The isolated AAV particle of any one of embodiments 137-142, wherein [A][B] comprises:

(i)
(SEQ ID NO: 3681)
PLNGAVH,
(SEQ ID NO: 5110)
PLNGAVN,
(SEQ ID NO: 5111)
PLNGAVQ,
(SEQ ID NO: 5112)
PLNGAIH,
(SEQ ID NO: 5113)
PLNGALH,
(SEQ ID NO: 5114)
PLNGAVP,
(SEQ ID NO: 5115)
PLNGAVD,
(SEQ ID NO: 5116)
PLNGAAH,
(SEQ ID NO: 5117)
PLNGAFH,
(SEQ ID NO: 5118)
PLNGADH,
(SEQ ID NO: 5119)
PLNGAVL,
(SEQ ID NO: 5120)
PLNGAGH,
(SEQ ID NO: 5121)
PLNGAVR,
or
(SEQ ID NO: 5122)
PLNGAVY;
(ii)
(SEQ ID NO: 3681)
PLNGAVH;

[0219] (iii) amino acid sequence comprising any portion of an amino acid sequence in (i) or (ii), e.g., any 2, 3, 4, 5, or 6 amino acids, e.g., consecutive amino acids, thereof;
[0220] (iv) an amino acid sequence comprising at least one, two, or three but no more than four modifications, e.g., substitutions (e.g., conservative substitutions), insertions, or deletions, relative to any of the amino acid sequences in (i) or (ii); or
[0221] (v) an amino acid sequence comprising at least one, two, or three but no more than four different amino acids, relative to any one of the amino acid sequences in (i) or (ii).
   144. The isolated AAV particle of any one of embodiments 137-143, wherein [A][B] is or comprises:

(i)
(SEQ ID NO: 3648)
PLNGAVHLY,
(SEQ ID NO: 4796)
PLNGAVHHY,
(SEQ ID NO: 4794)
PLNGAVHIY,
(SEQ ID NO: 5123)
PLNGAVNLY,
(SEQ ID NO: 5124)
PLNGAVQLY,
(SEQ ID NO: 5125)
PLNGAIHLY,
(SEQ ID NO: 5126)
PLNGALHLY,
(SEQ ID NO: 5127)
PLNGAVPLY,
(SEQ ID NO: 5128)
PLNGAVDLY,
(SEQ ID NO: 5129)
PLNGAAHLY,
(SEQ ID NO: 5130)
PLNGAVHRY,
(SEQ ID NO: 5131)
PLNGAFHLY,
(SEQ ID NO: 5132)
PLNGADHLY,
(SEQ ID NO: 5133)
PLNGAVLLY,
(SEQ ID NO: 5134)
PLNGAGHLY,
(SEQ ID NO: 5135)
PLNGAVRLY,
(SEQ ID NO: 5136)
PLNGAVHVY,
or
(SEQ ID NO: 5137)
PLNGAVYLY;
(ii)
(SEQ ID NO: 3648)
PLNGAVHLY,
(SEQ ID NO: 4796)
PLNGAVHHY,
or
(SEQ ID NO: 4794)
PLNGAVHIY;

[0222] (iii) amino acid sequence comprising any portion of an amino acid sequence in (i) or (ii), e.g., any 2, 3, 4, 5, 6, 7, or 8 amino acids, e.g., consecutive amino acids, thereof;
[0223] (iv) an amino acid sequence comprising at least one, two, or three but no more than four modifications, e.g., substitutions (e.g., conservative substitutions), insertions, or deletions, relative to any of the amino acid sequences in (i) or (ii); or
[0224] (v) an amino acid sequence comprising at least one, two, or three but no more than four different amino acids, relative to any one of the amino acid sequences in (i) or (ii).
   145. The isolated AAV particle of any one of embodiments 137-144, wherein [A][B] is or comprises PLNGAVHLY (SEQ ID NO: 3648).
   146. The isolated AAV particle of any one of embodiments 137-145, wherein the AAV capsid variant further comprises one, two, three, or all of an amino acid other than A at position 589 (e.g., D, S, or T), an amino acid other than Q at position 590 (e.g., K, H, L, P, or R), an amino acid other than A at position 591 (e.g., P or E), and/or an amino acid other than Q at position 592 (e.g., H, K, or P).
   147. The isolated AAV particle of any one of embodiments 137-146, which further comprises one, two, three, or all of an amino acid other than A at position 596 (e.g., D, S, or T), an amino acid other than Q at position 597 (e.g., K, H, L, P, or R), an amino acid other than A at position 598 (e.g., P or E), and/or an amino acid other than Q at position 599 (e.g., H, K, or P), relative to a reference sequence numbered according to the amino acid sequence of SEQ ID NO: 5, 8, or 3636.
   148. The isolated AAV particle of any one of embodiments 137-147, which further comprises:
[0225] (i) A at position 589, Q at position 590, A at position 591, and/or Q at position 592, numbered according to the amino acid sequence of SEQ ID NO: 138; or
[0226] (ii) A at position 596, Q at position 597, A at position 598, and/or Q at position 599, numbered according to the amino acid sequence of SEQ ID NO: 5, 8, or 3636.
   149. The isolated AAV particle of any one of embodiments 137-148, wherein the AAV capsid variant further comprises [C], wherein [C] comprises X4, X5, X6, and X7, wherein:
[0227] (a) position X4 is: A, D, S, or T;
[0228] (b) position X5 is: Q, K, H, L, P, or R;
[0229] (c) position X6 is: A, P, or E; and
[0230] (d) position X7 is: Q, H, K, or P; and/or
   an amino acid modification, e.g., a conservative substitution, of any of the aforesaid amino acids in (a)-(d).
   150. The isolated AAV particle of embodiment 149, wherein:
[0231] (a) position X4 is: A, D, or S;
[0232] (b) position X5 is Q or K;
[0233] (c) position X6 is A or P; and/or
[0234] (d) position X7 is Q.
   151. The isolated AAV particle of embodiment 149 or 150, wherein [C] comprises:
[0235] (i) AQ, AK, DQ, SQ, AH, AL, AP, AR, TQ, PQ, EQ, QA, QP, KA, HA, QE, LA, PA, or RA; or
[0236] (ii) AQ, AK, DQ, SQ, PQ, QA, QP, or KA.
   152. The isolated AAV particle of any one of embodiments 149-151, wherein [C] comprises:
[0237] (i) AQA, AQP, AKA, DQA, SQA, AHA, AQE, ALA, APA, ARA, TQA, QAQ, QPQ, KAQ, HAQ, QEQ, QAK, LAQ, PAQ, RAQ, QAH, or QAP; or
[0238] (ii) AQA, AQP, AKA, DQA, SQA, QAQ, QPQ, or KAQ.
   153. The isolated AAV particle of any one of embodiments 149-152, wherein [C] is or comprises:
[0239] (i) AQAQ (SEQ ID NO: 4737), AQPQ (SEQ ID NO: 4739), AKAQ (SEQ ID NO: 4741), DQAQ (SEQ ID NO: 4744), SQAQ (SEQ ID NO: 4738), AHAQ (SEQ ID NO: 4742), AQEQ (SEQ ID NO: 4748), AQAK (SEQ ID NO: 4746), ALAQ (SEQ ID NO: 4749), APAQ (SEQ ID NO: 4745), ARAQ (SEQ ID NO: 4750), AQAH (SEQ ID NO: 4747), AQAP (SEQ ID NO: 4743), or TQAQ (SEQ ID NO: 4751); or
[0240] (ii) AQAQ (SEQ ID NO: 4737), AQPQ (SEQ ID NO: 4739), AKAQ (SEQ ID NO: 4741), DQAQ (SEQ ID NO: 4744), or SQAQ (SEQ ID NO: 4738).
   154. The isolated AAV particle of any one of embodiments 149-153, wherein [C] is or comprises AQAQ (SEQ ID NO: 4737).
   155. The isolated AAV particle of any one of embodiments 149-154, wherein [B][C] is or comprises:

(i)
(SEQ ID NO: 4797)
VHLYAQAQ,
(SEQ ID NO: 4804)
VHHYAQAQ,
(SEQ ID NO: 4798)
VHLYAQPQ,
(SEQ ID NO: 4800)
VHLYAKAQ,
(SEQ ID NO: 4801)
VHLYDQAQ,
(SEQ ID NO: 4799)
VHLYSQAQ,
(SEQ ID NO: 4802)
VHIYAQAQ,
(SEQ ID NO: 5138)
VHLYAHAQ,
(SEQ ID NO: 5139)
VNLYAQAQ,
(SEQ ID NO: 5140)
VQLYAQAQ,
(SEQ ID NO: 5141)
VHLYAQEQ,
(SEQ ID NO: 5142)
IHLYAQAQ,
(SEQ ID NO: 5143)
LHLYAQAQ,
(SEQ ID NO: 5144)
VPLYAQAQ,
(SEQ ID NO: 5145)
VHLYAQAK,
(SEQ ID NO: 5146)
VDLYAQAQ,
(SEQ ID NO: 5147)
AHLYAQAQ,
(SEQ ID NO: 5148)
VHRYAQAQ,
(SEQ ID NO: 5149)
FHLYAQAQ,
(SEQ ID NO: 5150)
VHLYALAQ,
(SEQ ID NO: 5151)
DHLYAQAQ,
(SEQ ID NO: 5152)
VHLYAPAQ,
(SEQ ID NO: 5153)
VHLYARAQ,
(SEQ ID NO: 5154)
VHLYAQAH,
(SEQ ID NO: 5155)
VLLYAQAQ,
(SEQ ID NO: 5156)
VHLYAQAP,
(SEQ ID NO: 5157)
GHLYAQAQ,
(SEQ ID NO: 5158)
VRLYAQAQ,
(SEQ ID NO: 4803)
VHVYAQAQ,
(SEQ ID NO: 5159)
VYLYAQAQ,
or
(SEQ ID NO: 5160)
VHLYTQAQ;
(ii)
(SEQ ID NO: 4797)
VHLYAQAQ,
(SEQ ID NO: 4804)
VHHYAQAQ,
(SEQ ID NO: 4798)
VHLYAQPQ,
(SEQ ID NO: 4800)
VHLYAKAQ,
(SEQ ID NO: 4801)
VHLYDQAQ,
(SEQ ID NO: 4799)
VHLYSQAQ,
or
(SEQ ID NO: 4802)
VHIYAQAQ;

[0241] (iii) amino acid sequence comprising any portion of an amino acid sequence in (i) or (ii), e.g., any 2, 3, 4, 5, 6, or 7 amino acids, e.g., consecutive amino acids, thereof;
[0242] (iv) an amino acid sequence comprising at least one, two, or three but no more than four modifications, e.g., substitutions (e.g., conservative substitutions), insertions, or deletions, relative to any of the amino acid sequences in (i) or (ii); or
[0243] (v) an amino acid sequence comprising at least one, two, or three but no more than four different amino acids, relative to any one of the amino acid sequences in (i) or (ii).
   156. The isolated AAV particle of any one of embodiments 149-155, wherein [B][C] is or comprises VHLYAQAQ (SEQ ID NO: 4797).
   157. The isolated AAV particle of any one of embodiments 149-159, wherein [A][B][C] comprises:

(i)
(SEQ ID NO: 4813)
PLNGAVHLYAQ,
(SEQ ID NO: 4826)
PLNGAVHHYAQ,
(SEQ ID NO: 4812)
PLNGAVHLYAK,
(SEQ ID NO: 4814)
PLNGAVHLYDQ,
(SEQ ID NO: 4815)
PLNGAVHLYSQ,
(SEQ ID NO: 4824)
PLNGAVHIYAQ,
(SEQ ID NO: 5161)
PLNGAVHLYAH,
(SEQ ID NO: 5162)
PLNGAVNLYAQ,
(SEQ ID NO: 5163)
PLNGAVQLYAQ,
(SEQ ID NO: 5164)
PLNGAIHLYAQ,
(SEQ ID NO: 5165)
PLNGALHLYAQ,
(SEQ ID NO: 5166)
PLNGAVPLYAQ,
(SEQ ID NO: 5167)
PLNGAVDLYAQ,
(SEQ ID NO: 5168)
PLNGAAHLYAQ,
(SEQ ID NO: 5169)
PLNGAVHRYAQ,
(SEQ ID NO: 5170)
PLNGAFHLYAQ,
(SEQ ID NO: 5171)
PLNGAVHLYAL,
(SEQ ID NO: 5172)
PLNGADHLYAQ,
(SEQ ID NO: 5173)
PLNGAVHLYAP,
(SEQ ID NO: 5174)
PLNGAVHLYAR,
(SEQ ID NO: 5175)
PLNGAVLLYAQ,
(SEQ ID NO: 5176)
PLNGAGHLYAQ,
(SEQ ID NO: 5177)
PLNGAVRLYAQ,
(SEQ ID NO: 5178)
PLNGAVHVYAQ,
(SEQ ID NO: 5179)
PLNGAVYLYAQ,
(SEQ ID NO: 5180)
PLNGAVHLYTQ;
(ii)
(SEQ ID NO: 4813)
PLNGAVHLYAQ,
(SEQ ID NO: 4826)
PLNGAVHHYAQ,
(SEQ ID NO: 4812)
PLNGAVHLYAK,
(SEQ ID NO: 4814)
PLNGAVHLYDQ,
(SEQ ID NO: 4815)
PLNGAVHLYSQ,
(SEQ ID NO: 4824)
PLNGAVHIYAQ;

[0244] (iii) amino acid sequence comprising any portion of an amino acid sequence in (i) or (ii), e.g., any 2, 3, 4, 5, 6, 7, 8, 9, or 10 amino acids, e.g., consecutive amino acids, thereof;
[0245] (iv) an amino acid sequence comprising at least one, two, or three but no more than four modifications, e.g., substitutions (e.g., conservative substitutions), insertions, or deletions, relative to any of the amino acid sequences in (i) or (ii); or
[0246] (v) an amino acid sequence comprising at least one, two, or three but no more than four different amino acids, relative to any one of the amino acid sequences in (i) or (ii).
   158. The isolated AAV particle of any one of embodiments 149-157, wherein [A][B][C] is or comprises:

(i)
(SEQ ID NO: 4836)
PLNGAVHLYAQAQ,
(SEQ ID NO: 4850)
PLNGAVHHYAQAQ,
(SEQ ID NO: 4837)
PLNGAVHLYAQPQ,
(SEQ ID NO: 4835)
PLNGAVHLYAKAQ,
(SEQ ID NO: 4838)
PLNGAVHLYDQAQ,
(SEQ ID NO: 4839)
PLNGAVHLYSQAQ,
(SEQ ID NO: 4848)
PLNGAVHIYAQAQ,
(SEQ ID NO: 5181)
PLNGAVHLYAHAQ,
(SEQ ID NO: 5182)
PLNGAVNLYAQAQ,
(SEQ ID NO: 5183)
PLNGAVQLYAQAQ,
(SEQ ID NO: 5184)
PLNGAVHLYAQEQ,
(SEQ ID NO: 5185)
PLNGAIHLYAQAQ,
(SEQ ID NO: 5186)
PLNGALHLYAQAQ,
(SEQ ID NO: 5187)
PLNGAVPLYAQAQ,
(SEQ ID NO: 5188)
PLNGAVHLYAQAK,
(SEQ ID NO: 5189)
PLNGAVDLYAQAQ,
(SEQ ID NO: 5190)
PLNGAAHLYAQAQ,
(SEQ ID NO: 5191)
PLNGAVHRYAQAQ,
(SEQ ID NO: 5192)
PLNGAFHLYAQAQ,
(SEQ ID NO: 5193)
PLNGAVHLYALAQ,
(SEQ ID NO: 5194)
PLNGADHLYAQAQ,
(SEQ ID NO: 5195)
PLNGAVHLYAPAQ,
(SEQ ID NO: 5196)
PLNGAVHLYARAQ,
(SEQ ID NO: 5197)
PLNGAVHLYAQAH,
(SEQ ID NO: 5198)
PLNGAVLLYAQAQ,
(SEQ ID NO: 5199)
PLNGAVHLYAQAP,
(SEQ ID NO: 5200)
PLNGAGHLYAQAQ,
(SEQ ID NO: 5201)
PLNGAVRLYAQAQ,
(SEQ ID NO: 5202)
PLNGAVHVYAQAQ,
(SEQ ID NO: 5203)
PLNGAVYLYAQAQ,
(SEQ ID NO: 5204)
PLNGAVHLYTQAQ;
(ii)
(SEQ ID NO: 4836)
PLNGAVHLYAQAQ,
(SEQ ID NO: 4850)
PLNGAVHHYAQAQ,
(SEQ ID NO: 4837)
PLNGAVHLYAQPQ,
(SEQ ID NO: 4835)
PLNGAVHLYAKAQ,
(SEQ ID NO: 4838)
PLNGAVHLYDQAQ,
(SEQ ID NO: 4839)
PLNGAVHLYSQAQ,
(SEQ ID NO: 4848)
PLNGAVHIYAQAQ;

[0247] (iii) amino acid sequence comprising any portion of an amino acid sequence in (i) or (ii), e.g., any 2, 3, 4, 5, 6, 7, 8, 9, 10, 11, or 12 amino acids, e.g., consecutive amino acids, thereof;
[0248] (iv) an amino acid sequence comprising at least one, two, or three but no more than four modifications, e.g., substitutions (e.g., conservative substitutions), insertions, or deletions, relative to any of the amino acid sequences in (i) or (ii); or
[0249] (v) an amino acid sequence comprising at least one, two, or three but no more than four different amino acids, relative to any one of the amino acid sequences in (i) or (ii).
   159. The isolated AAV particle of any one of embodiments 149-158, wherein [A][B][C] is or comprises PLNGAVHLYAQAQ (SEQ ID NO: 4836).
   160. The isolated AAV particle of any one of embodiment 137-159, wherein the AAV capsid variant further comprises one, two, or all of an amino acid other than T at position 593 (e.g., a V, S, L, R, I, A, N, C, Q, M, P, or K), an amino acid other than G at position 594 (e.g., T, M, A, K, S, Q, V, I, R, N, P, L, H, or Y), and/or an amino acid other than W at position 595 (e.g., K, Q, S, P, C, A, G, N, T, R, V, M, H, L, E, F, or Y), relative to a reference sequence numbered according to the amino acid sequence of SEQ ID NO: 138
   161. The isolated AAV particle of any one of embodiment 137-160, which further comprises one, two, or all of an amino acid other than T at position 600 (e.g., a V, S, L, R, I, A, N, C, Q, M, P, or K), an amino acid other than G at position 601 (e.g., T, M, A, K, S, Q, V, I, R, N, P, L, H, or Y), and/or an amino acid other than W at position 602 (e.g., K, Q, S, P, C, A, G, N, T, R, V, M, H, L, E, F, or Y), relative to a reference sequence numbered according to the amino acid sequence of SEQ ID NO: 5, 8, 3636.
   162. The isolated AAV particle of any one of embodiment 137-161, which further comprises one, two, three or all of:
[0250] (i) the amino acid V, S, L, R, I, A, N, C, Q, M, P, or K (e.g., L) at position 593 numbered according to SEQ ID NO: 138 or at position 600 numbered according to SEQ ID NO: 5, 8, or 3636);
[0251] (ii) the amino acid T, M, A, K, S, Q, V, I, R, N, P, L, H, or Y (e.g., S) at position 594 numbered according to SEQ ID NO: 138, or at position 601 numbered according to SEQ ID NO: 5, 8, or 3636; and/or
[0252] (iii) the amino acid K, Q, S, P, C, A, G, N, T, R, V, M, H, L, E, F, or Y (e.g. P) at position 595 numbered according to SEQ ID NO: 138 or at position 602 numbered according to SEQ ID NO: 5, 8, or 3636).
   163. The isolated AAV particle of any one of embodiment 73-162, which further comprises:
[0253] (i) the amino acid L at position 593 numbered according to SEQ ID NO: 138 or at position 600 numbered according to SEQ ID NO: 5, 8, or 3636);
[0254] (ii) the amino acid S at position 594 numbered according to SEQ ID NO: 138, or at position 601 numbered according to SEQ ID NO: 5, 8, or 3636; and
[0255] (iii) the amino acid P at position 595 numbered according to SEQ ID NO: 138 or at position 602 numbered according to SEQ ID NO: 5, 8, or 3636).
   164. The isolated AAV particle of any one of embodiment 137-162, which further comprises:
[0256] (i) T at position 593, G at position 594, and/or W at position 595, numbered according to SEQ ID NO: 138;
[0257] (ii) T at position 600, G at position 601, and/or W at position 602, numbered according to SEQ ID NO: 5, 8, or 3636.
   165. The isolated AAV particle of any one of embodiments 137-164, wherein the AAV capsid variant further comprises [D], wherein [D] comprises X8, X9, and X10, wherein:
[0258] (a) position X8 is: T, V, S, L, R, I, A, N, C, Q, M, P, or K;
[0259] (b) position X9 is: T, M, A, G, K, S, Q, V, I, R, N, P, L, H, or Y; and
[0260] (c) position X10 is: K, Q, W, S, P, C, A, G, N, T, R, V, M, H, L, E, F, or Y; and/or
[0261] an amino acid modification, e.g., a conservative substitution, of any of the aforesaid amino acids in (a)-(c).
   166. The isolated AAV particle of embodiment 165, wherein:
[0262] (a) position X8 is: T, V, S, L, R, I, A, N, C, Q, or M;
[0263] (b) position X9 is: T, M, A, G, K, S, Q, V, I, R, N, P, L, or H; and/or
[0264] (c) position X10 is: K, Q, W, S, P, C, A, G, N, T, R, V, M, H, L, or E.
   167. The isolated AAV particle of embodiment 165 or 166, wherein [D] comprises:
[0265] (i) TT, TM, VA, TA, TG, VK, SA, LS, LA, TQ, TV, RI, RA, LT, ST, TS, VS, VT, RQ, IS, VR, LG, TN, VQ, AA, RS, IQ, IA, RG, NS, LQ, VM, SM, VG, CS, TP, SS, AG, TL, LN, TK, CT, AS, LK, LM, LH, RT, RM, VH, TR, SG, VL, QA, NA, AT, NT, RL, IT, IG, RN, NM, NV, MA, IL, VN, SV, RV, PG, QS, RY, SQ, NQ, LL, LP, AQ, TY, NL, SP, LV, KG, VP, AV, KS, AM, SL, AL, RP, IP, MK, AW, GS, KQ, AP, SK, AK, GC, QK, MQ, QP, GP, QQ, AN, GK, QR, PP, AR, GG, MS, NP, KP, MN, KA, SN, MP, HP, GN, RW, MT, SR, GW, QH, GL, QM, VW, MG, AH, QT, GR, SH, GQ, GT, GA, NG, QN, VE, MM, QL, QG, YS, GM, LR, AF, PQ, SW, QW, YA, ML, GF, PA, PS, PT, GY, GV, PW, PR; or
[0266] (ii) TT, TM, VA, TA, TG, VK, SA, LS, LA, TQ, TV, RI, RA, LT, ST, TS, VS, VT, RQ, IS, VR, LG, TN, VQ, AA, RS, IQ, IA, RG, NS, LQ, VM, SM, VG, CS, TP, SS, AG, TL, LN, TK, CT, AS, LK, LM, LH, RT, RM, VH, TR, SG, VL, QA, NA, AT, NT, RL, IT, IG, RN, NM, NV, MA, IL, VN, SV, RV, MK, AQ, AW, GS, KQ, AP, SK, AK, GC, QK, SP, MQ, SQ, QP, RP, GP, NQ, QQ, AN, GK, QS, QR, PP, AR, GG, MS, NP, KP, MN, KS, KA, SN, MP, HP, GN, RW, MT, AM, SR, GW, QH, GL, AV, QM, VW, MG, AL, AH, SL, QT, GR, SH, LP, GQ, GT, GA, NG, QN, IP, or VE.
   168. The isolated AAV particle of any one of embodiments 165-167, wherein [D] is or comprises:
[0267] (i) UK, TMK, VAQ, TAW, TGS, VKQ, SAP, LSK, LAP, LAQ, TAK, SAK, TGC, TQK, TVA, LSP, TTQ, TAQ, RIA, RAS, TTP, LTP, STP, TSP, TMQ, TSK, VSQ, VSP, TVQ, VTA, RQP, ISG, VRP, LGP, TNQ, VQQ, VAN, AAP, RST, TMA, IQP, IAS, TVS, RGS, NSP, LQP, VTG, VMQ, SMA, VGK, IQS, CSP, LQR, TPP, VTK, SSP, AGP, LAR, TT, TGG, TLQ, TMS, VAK, RAA, TVG, LNP, LSQ, TKP, TNA, LAT, VTP, VQA, TTS, CTP, TAG, TSQ, TMN, TST, VKP, ASP, VAA, LKS, IAA, TAA, TKA, VSN, TAP, LMP, LHP, RAQ, LTN, RU, TSV, RMS, VGN, LMQ, TAT, VHP, ISS, VAS, TRW, TMT, RSS, RTG, VAT, VTS, VSS, TNS, VKA, SGP, TGP, TAM, TQP, TQQ, VSR, TGW, VSA, VLS, TQH, LAS, QAP, NAQ, ATP, VQP, TTA, LAA, RSG, LMA, TMP, LAN, VST, SAQ, NTP, TGL, TAV, RLG, RTL, TQM, ITP, TVW, RSA, TAS, TMG, VQS, ISP, VGG, TAL, LAG, RTA, RSP, TLA, LAH, TSL, RLS, LMG, SMQ, TQT, VGS, VSG, VMA, IGG, IAG, TGR, LSH, VQT, RNS, TLP, TKQ, LGQ, NMQ, NVQ, RGG, VMS, TTG, LSR, MAP, ILG, TGT, TSS, TSH, RIG, SAM, TSM, SMG, SMS, TSG, TGA, VNS, VAG, IGS, LGS, VNG, LTA, VQN, TKS, SVG, NAS, TSA, TAN, LTS, RSQ, RIP, RVE, VLP, SVA, LQQ, LST, SAA, RTS, TQN, VNA, LMS, TMM, RSV, TQL, RTP, RQQ, VQG, PGW, STQ, QSP, RYS, TQR, SAG, RQS, SQP, STS, VLG, NQP, LGT, RAG, TGM, LSN, RLP, RQG, RLT, TLR, SAF, SVQ, LLP, RTQ, LPP, AQP, TPQ, TSW, NTT, TTR, TQW, NTQ, TYA, TLS, NLP, ATS, ATQ, LSS, TQA, VMP, NAL, RML, RQL, TLG, TGF, SAL, SQL, LSA, TGQ, TNG, AAA, SAV, LSG, SSR, SPP, LVG, TPA, KGW, VPP, ATG, SAN, SQQ, SSM, AVG, VAP, TPS, RGW, SSL, TYS, TPT, IGW, KSS, TGY, RSL, SVS, TSN, SQM, VPA, AMS, TPG, TGV, VPQ, SLP, ALP, TPW, TPR, SSS, RPP, IPP, AGW, or RPG; or
[0268] (ii) TK, TMK, VAQ, TAW, TGS, VKQ, SAP, LSK, LAP, LAQ, TAK, SAK, TGC, TQK, TVA, LSP, TTQ, TAQ, RIA, RAS, TTP, LTP, STP, TSP, TMQ, TSK, VSQ, VSP, TVQ, VTA, RQP, ISG, VRP, LGP, TNQ, VQQ, VAN, AAP, RST, TMA, IQP, IAS, TVS, RGS, NSP, LQP, VTG, VMQ, SMA, VGK, IQS, CSP, LQR, TPP, VTK, SSP, AGP, LAR, TIT, TGG, TLQ, TMS, VAK, RAA, TVG, LNP, LSQ, TKP, TNA, LAT, VTP, VQA, TTS, CTP, TAG, TSQ, TMN, TST, VKP, ASP, VAA, LKS, IAA, TAA, TKA, VSN, TAP, LMP, LHP, RAQ, LTN, RTT, TSV, RMS, VGN, LMQ, TAT, VHP, ISS, VAS, TRW, TMT, RSS, RTG, VAT, VTS, VSS, TNS, VKA, SGP, TGP, TAM, TQP, TQQ, VSR, TGW, VSA, VLS, TQH, LAS, QAP, NAQ, ATP, VQP, TTA, LAA, RSG, LMA, TMP, LAN, VST, SAQ, NTP, TGL, TAV, RLG, RTL, TQM, ITP, TVW, RSA, TAS, TMG, VQS, ISP, VGG, TAL, LAG, RTA, RSP, TLA, LAH, TSL, RLS, LMG, SMQ, TQT, VGS, VSG, VMA, IGG, IAG, TGR, LSH, VQT, RNS, TLP, TKQ, LGQ, NMQ, NVQ, RGG, VMS, TTG, LSR, MAP, ILG, TGT, TSS, TSH, RIG, SAM, TSM, SMG, SMS, TSG, TGA, VNS, VAG, IGS, LGS, VNG, LTA, VQN, TKS, SVG, NAS, TSA, TAN, LTS, RSQ, RIP, RVE, VLP, SVA, LQQ, LST, SAA, RTS, TQN, VNA, or LMS.
   169. The isolated AAV particle of any one of embodiments 165-168, wherein [D] is or comprises TGW.
   170. The isolated AAV particle of any one of embodiments 165-168, wherein [D] is or comprises LSP.
   171. The isolated AAV particle of any one of embodiments 137-170, wherein the AAV capsid variant further comprises one, two, or all of an amino acid other than V at position 596 (e.g., D, F, A, E, L, G, or I), an amino acid other than Q at position 597 (e.g., R, P, K, L, H, or E), and/or an amino acid other than N at position 598 (e.g., H, S, T, P, K, I, D, or Y), relative to a reference sequence numbered according to the amino acid sequence of SEQ ID NO: 138.
   172. The isolated AAV particle of any one of embodiments 137-171, which further comprises one, two, or all of an amino acid other than V at position 603 (e.g., D, F, A, E, L, G, or I), an amino acid other than Q at position 604 (e.g., R, P, K, L, H, or E), and/or an amino acid other than N at position 605 (e.g., H, S, T, P, K, I, D, or Y), relative to a reference sequence numbered according to the amino acid sequence of SEQ ID NO: 5, 8, or 3636.
   173. The isolated AAV particle of any one of embodiments 137-172, which further comprises one, two, or all of:
[0269] (i) the amino acid V, D, F, A, E, L, G, or I at position 5%, numbered according to SEQ ID NO: 138, or at position 603 numbered according to SEQ ID NO: 5, 8, or 3636;
[0270] (ii) the amino acid R, P, K, L, H, or E at position 597, numbered according to SEQ ID NO: 138, or at position 604 numbered according to SEQ ID NO: 5, 8, or 3636; and/or
[0271] (iii) the amino acid N, H, S, T, P, K, I, D, or Y at position 598, numbered according to SEQ ID NO: 138, or at position 605 numbered according to SEQ ID NO: 5, 8, or 3636.
   174. The isolated AAV particle of any one of embodiments 137-173, which further comprises P, K, E, or H at position 597, numbered according to SEQ ID NO: 138.
   175. The isolated AAV particle of any one of embodiments 137-174, which further comprises one, two, or all of:
[0272] (i) the amino acid V at position 5% numbered according to SEQ ID NO: 138 or at position 603 numbered according to SEQ ID NO: 5, 8, or 3636;
[0273] (ii) the amino acid K, P, E or H at position 597 numbered according to SEQ ID NO: 138 or at position 604 numbered according to SEQ ID NO: 5, 8, or 3636; and
[0274] (iii) the amino acid N at position 598 numbered according to the amino acid sequence of SEQ ID NO: 138 or at position 605 numbered according to SEQ ID NO: 5, 8, or 3636.
   176. The isolated AAV particle of any one of embodiments 137-175, wherein the AAV capsid variant further comprises [E], wherein [E] comprises X11, X12, and X13, wherein:
[0275] (a) position X11 is: V, D, F, A, E, L, G, or I;
[0276] (b) position X12 is: Q, R, P, K, L, H, or E; and
[0277] (c) position X13 is: N, H, S, T, P, K, I, D, or Y; and/or
   an amino acid modification, e.g., a conservative substitution, of any of the aforesaid amino acids in (a)-(c).
   177. The isolated AAV particle of embodiment 176, wherein:
[0278] (a) position X11 is: V, D, F, A, E, L, or G;
[0279] (b) position X12 is: Q, R, P, K, or L; and/or
[0280] (c) position X13 is: N, H, S, T, P, K, I, or D.
   178. The isolated AAV particle of embodiment 176 or 177, wherein:
[0281] (a) position X11 is V;
[0282] (b) position X12: Q, R, P, K, or L; and/or
[0283] (c) position X13 is: N.
   179. The isolated AAV particle of any one of embodiments 176-178, wherein position X12 is P.
   180. The isolated AAV particle of any one of embodiments 176-178, wherein position X12 is K.
   181. The isolated AAV particle of any one of embodiments 176-178, wherein position X12 is E or H.
   182. The isolated AAV particle of any one of embodiments 176-181, wherein [E] comprises:
[0284] (i) VQ, DQ, FQ, VR, VP, VK, AQ, EQ, LQ, GQ, VL, VH, VE, DK, GH, IQ, QN, QH, QS, QT, QP, RN, PN, KN, QK, QI, LN, QD, HN, KT, KK, EN, QY, or PH; or
[0285] (ii) VQ, DQ, FQ, VR, VP, VK, AQ, EQ, LQ, GQ, VL, QN, QH, QS, QT, QP, RN, PN, KN, QK, QI, LN, or QD.
   183. The isolated AAV particle of any one of embodiments 176-182, wherein [E] is or comprises:
[0286] (i) VQN, DQN, VQH, FQN, VQS, VQT, VQP, VRN, VPN, VKN, AQN, VQK, EQN, VQI, LQN, GQT, VLN, VQD, VHN, GQN, VKT, VKK, FQK, VEN, VQY, DKN, GHN, IQN, or VPH; or
[0287] (ii) VQN, DQN, VQH, FQN, VQS, VQT, VQP, VRN, VPN, VKN, AQN, VQK, EQN, VQI, LQN, GQT, VLN, or VQD.
   184. The isolated AAV particle of any one of embodiments 176-183, wherein [E] is or comprises VQN, VPN, or VKN.
   185. The isolated AAV particle of any one of embodiments 176-183, wherein [E] is or comprises VEN, VHN, VKN, or VPN.
   186. The isolated AAV particle of any one of embodiments 176-185, wherein [D][E] is or comprises:

(i)
(SEQ ID NO: 5047)
TTKVQN,
(SEQ ID NO: 5013)
TMKVQN,
(SEQ ID NO: 5062)
VAQVQN,
(SEQ ID NO: 4978)
TAWDQN,
(SEQ ID NO: 4992)
TGSVQH,
(SEQ ID NO: 5072)
VKQVQN,
(SEQ ID NO: 4854)
SAPVQN,
(SEQ ID NO: 4912)
LSKVQN,
(SEQ ID NO: 4891)
LAPVQN,
(SEQ ID NO: 4893)
LAQVQN,
(SEQ ID NO: 4968)
TAKVQN,
(SEQ ID NO: 4955)
SAKVQN,
(SEQ ID NO: 4982)
TGCFQN,
(SEQ ID NO: 5026)
TQKVQN,
(SEQ ID NO: 5052)
TVAVQN,
(SEQ ID NO: 4914)
LSPVQN,
(SEQ ID NO: 5050)
TTQVQN,
(SEQ ID NO: 4973)
TAQVQN,
(SEQ ID NO: 4934)
RIAVQN,
(SEQ ID NO: 4931)
RASVQN,
(SEQ ID NO: 5048)
TTPVQN,
(SEQ ID NO: 4853)
LTPVQN,
(SEQ ID NO: 4963)
STPVQN,
(SEQ ID NO: 4861)
TSPVQN,
(SEQ ID NO: 5016)
TMQVQN,
(SEQ ID NO: 5036)
TSKVQN,
(SEQ ID NO: 5092)
VSQVQN,
(SEQ ID NO: 4868)
VSPVQN,
(SEQ ID NO: 5055)
TVQVQN,
(SEQ ID NO: 5097)
VTAVQN,
(SEQ ID NO: 4941)
RQPVQN,
(SEQ ID NO: 4884)
ISGVQN,
(SEQ ID NO: 5087)
VRPVQN,
(SEQ ID NO: 4897)
LGPVQN,
(SEQ ID NO: 5022)
TNQVQN,
(SEQ ID NO: 5084)
VQQVQN,
(SEQ ID NO: 5061)
VANVQN,
(SEQ ID NO: 4870)
AAPVQN,
(SEQ ID NO: 4947)
RSTVQN,
(SEQ ID NO: 5011)
TMAVQN,
(SEQ ID NO: 4882)
IQPVQN,
(SEQ ID NO: 4878)
IASVQN,
(SEQ ID NO: 4867)
TVSVQN,
(SEQ ID NO: 4933)
RGSVQN,
(SEQ ID NO: 4925)
NSPVQN,
(SEQ ID NO: 4908)
LQPVQN,
(SEQ ID NO: 5098)
VTGVQN,
(SEQ ID NO: 5076)
VMQVQN,
(SEQ ID NO: 4959)
SMAVQN,
(SEQ ID NO: 5066)
VGKVQN,
(SEQ ID NO: 4883)
IQSVQN,
(SEQ ID NO: 4874)
CSPVQN,
(SEQ ID NO: 4910)
LQRVQN,
(SEQ ID NO: 4979)
TAWVQH,
(SEQ ID NO: 5024)
TPPVQN,
(SEQ ID NO: 5099)
VTKVQN,
(SEQ ID NO: 4855)
SSPVQN,
(SEQ ID NO: 4871)
AGPVQN,
(SEQ ID NO: 4894)
LARVQN,
(SEQ ID NO: 5051)
TTTVQN,
(SEQ ID NO: 4984)
TGGFQN,
(SEQ ID NO: 5010)
TLQVQN,
(SEQ ID NO: 5018)
TMSVQN,
(SEQ ID NO: 5060)
VAKVQN,
(SEQ ID NO: 4929)
RAAVQN,
(SEQ ID NO: 5054)
TVGVQN,
(SEQ ID NO: 4907)
LNPVQN,
(SEQ ID NO: 4915)
LSQVQN,
(SEQ ID NO: 5006)
TKPVQN,
(SEQ ID NO: 5021)
TNAVQN,
(SEQ ID NO: 4896)
LATVQN,
(SEQ ID NO: 5100)
VTPVQN,
(SEQ ID NO: 5081)
VQAVQN,
(SEQ ID NO: 4860)
TTSVQN,
(SEQ ID NO: 4875)
CTPVQN,
(SEQ ID NO: 4967)
TAGVQN,
(SEQ ID NO: 5040)
TSQVQN,
(SEQ ID NO: 5014)
TMNVQN,
(SEQ ID NO: 5043)
TSTVQN,
(SEQ ID NO: 5071)
VKPVQN,
(SEQ ID NO: 4872)
ASPVQN,
(SEQ ID NO: 5058)
VAAVQN,
(SEQ ID NO: 4901)
LKSVQN,
(SEQ ID NO: 4876)
IAAVQN,
(SEQ ID NO: 4966)
TAAVQN,
(SEQ ID NO: 5005)
TKAVQN,
(SEQ ID NO: 4994)
TGSVQS,
(SEQ ID NO: 5090)
VSNVQN,
(SEQ ID NO: 4971)
TAPVQN,
(SEQ ID NO: 4904)
LMPVQN,
(SEQ ID NO: 4900)
LHPVQN,
(SEQ ID NO: 4930)
RAQVQN,
(SEQ ID NO: 4919)
LTNVQN,
(SEQ ID NO: 4952)
RTTVQN,
(SEQ ID NO: 5044)
TSVVQN,
(SEQ ID NO: 4939)
RMSVQN,
(SEQ ID NO: 5067)
VGNVQN,
(SEQ ID NO: 4905)
LMQVQN,
(SEQ ID NO: 4976)
TATVQN,
(SEQ ID NO: 5069)
VHPVQN,
(SEQ ID NO: 5091)
VSPVQT,
(SEQ ID NO: 4886)
ISSVQN,
(SEQ ID NO: 5063)
VASVQN,
(SEQ ID NO: 5032)
TRWDQN,
(SEQ ID NO: 5020)
TMTVQN,
(SEQ ID NO: 4946)
RSSVQN,
(SEQ ID NO: 4863)
TAWVQN,
(SEQ ID NO: 4949)
RTGVQN,
(SEQ ID NO: 5064)
VATVQN,
(SEQ ID NO: 5101)
VTSVQN,
(SEQ ID NO: 4869)
VSSVQN,
(SEQ ID NO: 5023)
TNSVQN,
(SEQ ID NO: 5070)
VKAVQN,
(SEQ ID NO: 4958)
SGPVQN,
(SEQ ID NO: 4989)
TGPVQN,
(SEQ ID NO: 4969)
TAMVQN,
(SEQ ID NO: 5029)
TQPVQN,
(SEQ ID NO: 5030)
TQQVQN,
(SEQ ID NO: 5093)
VSRVQN,
(SEQ ID NO: 5002)
TGWVQP,
(SEQ ID NO: 5088)
VSAVQN,
(SEQ ID NO: 5074)
VLSVQN,
(SEQ ID NO: 5025)
TQHVQN,
(SEQ ID NO: 4895)
LASVQN,
(SEQ ID NO: 4928)
QAPVQN,
(SEQ ID NO: 4922)
NAQVQN,
(SEQ ID NO: 4873)
ATPVQN,
(SEQ ID NO: 5083)
VQPVQN,
(SEQ ID NO: 5045)
TTAVQN,
(SEQ ID NO: 5004)
TGWVRN,
(SEQ ID NO: 4852)
LAAVQN,
(SEQ ID NO: 5039)
TSPDQN,
(SEQ ID NO: 4943)
RSGVQN,
(SEQ ID NO: 4988)
TGGVQT,
(SEQ ID NO: 5000)
TGWVPN,
(SEQ ID NO: 5049)
TTPVQT,
(SEQ ID NO: 4902)
LMAVQN,
(SEQ ID NO: 5015)
TMPVQN,
(SEQ ID NO: 4890)
LANVQN,
(SEQ ID NO: 5096)
VSTVQN,
(SEQ ID NO: 4957)
SAQVQN,
(SEQ ID NO: 4926)
NTPVQN,
(SEQ ID NO: 5095)
VSSVQT,
(SEQ ID NO: 5056)
TVSVKN,
(SEQ ID NO: 5102)
TGLVQN,
(SEQ ID NO: 4865)
TGSVQN,
(SEQ ID NO: 4983)
TGGAQN,
(SEQ ID NO: 4977)
TAVVQN,
(SEQ ID NO: 4937)
RLGVQN,
(SEQ ID NO: 4950)
RTLVQN,
(SEQ ID NO: 5027)
TQMVQN,
(SEQ ID NO: 4887)
ITPVQN,
(SEQ ID NO: 5057)
TVWVQK,
(SEQ ID NO: 4942)
RSAVQN,
(SEQ ID NO: 4974)
TASVQN,
(SEQ ID NO: 5012)
TMGVQN,
(SEQ ID NO: 4986)
TGGVQH,
(SEQ ID NO: 5085)
VQSVQN,
(SEQ ID NO: 4864)
TGGVQN,
(SEQ ID NO: 4885)
ISPVQN,
(SEQ ID NO: 5103)
TGWVKN,
(SEQ ID NO: 4990)
TGSAQN,
(SEQ ID NO: 4857)
TGWAQN,
(SEQ ID NO: 5019)
TMSVQT,
(SEQ ID NO: 5065)
VGGVQN,
(SEQ ID NO: 4892)
LAPVQT,
(SEQ ID NO: 4862)
TALVQN,
(SEQ ID NO: 4888)
LAGVQN,
(SEQ ID NO: 4948)
RTAVQN,
(SEQ ID NO: 4944)
RSPVQN,
(SEQ ID NO: 4859)
TLAVQN,
(SEQ ID NO: 4889)
LAHVQN,
(SEQ ID NO: 5037)
TSLVQN,
(SEQ ID NO: 4938)
RLSVQN,
(SEQ ID NO: 4903)
LMGVQN,
(SEQ ID NO: 4961)
SMQVQN,
(SEQ ID NO: 5031)
TQTVQN,
(SEQ ID NO: 4997)
TGWEQN,
(SEQ ID NO: 5068)
VGSVQN,
(SEQ ID NO: 5089)
VSGVQN,
(SEQ ID NO: 5075)
VMAVQN,
(SEQ ID NO: 4879)
IGGVQN,
(SEQ ID NO: 4877)
IAGVQN,
(SEQ ID NO: 4856)
TGRVQN,
(SEQ ID NO: 4911)
LSHVQN,
(SEQ ID NO: 5086)
VQTVQN,
(SEQ ID NO: 4866)
TGWDQN,
(SEQ ID NO: 4940)
RNSVQN,
(SEQ ID NO: 5009)
TLPVQN,
(SEQ ID NO: 5007)
TKQVQN,
(SEQ ID NO: 4898)
LGQVQN,
(SEQ ID NO: 4924)
NMQVQN,
(SEQ ID NO: 4927)
NVQVQN,
(SEQ ID NO: 4993)
TGSVQI,
(SEQ ID NO: 4932)
RGGVQN,
(SEQ ID NO: 5077)
VMSVQN,
(SEQ ID NO: 5046)
TTGVQN,
(SEQ ID NO: 4913)
LSPVQK,
(SEQ ID NO: 4916)
LSRVQN,
(SEQ ID NO: 5094)
VSSVQK,
(SEQ ID NO: 4972)
TAPVQT,
(SEQ ID NO: 4921)
MAPVQN,
(SEQ ID NO: 4881)
ILGVQN,
(SEQ ID NO: 4975)
TASVQT,
(SEQ ID NO: 4991)
TGSLQN,
(SEQ ID NO: 4996)
TGTVQN,
(SEQ ID NO: 4995)
TGSVQT,
(SEQ ID NO: 5042)
TSSVQT,
(SEQ ID NO: 5035)
TSHVQN,
(SEQ ID NO: 4935)
RIGVQN,
(SEQ ID NO: 4999)
TGWGQT,
(SEQ ID NO: 4956)
SAMVQN,
(SEQ ID NO: 5038)
TSMVQN,
(SEQ ID NO: 4960)
SMGVQN,
(SEQ ID NO: 4962)
SMSVQN,
(SEQ ID NO: 5041)
TSSVQN,
(SEQ ID NO: 5034)
TSGVQN,
(SEQ ID NO: 4981)
TGAVQN,
(SEQ ID NO: 5080)
VNSVQN,
(SEQ ID NO: 5059)
VAGVQN,
(SEQ ID NO: 4880)
IGSVQN,
(SEQ ID NO: 4899)
LGSVQN,
(SEQ ID NO: 5079)
VNGVQN,
(SEQ ID NO: 4918)
LTAVQN,
(SEQ ID NO: 5082)
VQNVQN,
(SEQ ID NO: 5008)
TKSVQN,
(SEQ ID NO: 4965)
SVGVQN,
(SEQ ID NO: 4980)
TAWVQT,
(SEQ ID NO: 4923)
NASVQN,
(SEQ ID NO: 5033)
TSAVQN,
(SEQ ID NO: 5017)
TMSVKN,
(SEQ ID NO: 4970)
TANVQN,
(SEQ ID NO: 4998)
TGWFQN,
(SEQ ID NO: 4985)
TGGVLN,
(SEQ ID NO: 4920)
LTSVQN,
(SEQ ID NO: 5003)
TGWVQT,
(SEQ ID NO: 4945)
RSQVQN,
(SEQ ID NO: 4936)
RIPVQN,
(SEQ ID NO: 5001)
TGWVQD,
(SEQ ID NO: 4953)
RVEVQN,
(SEQ ID NO: 5073)
VLPVQN,
(SEQ ID NO: 4987)
TGGVQK,
(SEQ ID NO: 4964)
SVAVQN,
(SEQ ID NO: 4909)
LQQVQN,
(SEQ ID NO: 4917)
LSTVQN,
(SEQ ID NO: 4954)
SAAVQN,
(SEQ ID NO: 4951)
RTSVQN,
(SEQ ID NO: 5028)
TQNVQN,
(SEQ ID NO: 5078)
VNAVQN,
(SEQ ID NO: 5053)
TVAVQT,
(SEQ ID NO: 4906)
LMSVQN,
(SEQ ID NO: 4851)
TGWVQN,
(SEQ ID NO: 5105)
TGWVQH,
(SEQ ID NO: 4858)
TGWVQS,
(SEQ ID NO: 5205)
TMMVQN,
(SEQ ID NO: 5206)
TGGVQS,
(SEQ ID NO: 5207)
TGSFQN,
(SEQ ID NO: 5208)
RSVVQN,
(SEQ ID NO: 5209)
TGSVQK,
(SEQ ID NO: 5210)
TQLVQN,
(SEQ ID NO: 5211)
TGGVHN,
(SEQ ID NO: 5212)
RTPVQN,
(SEQ ID NO: 5213)
RQQVQN,
(SEQ ID NO: 5214)
TGSVRN,
(SEQ ID NO: 5215)
VQGVQN,
(SEQ ID NO: 5216)
PGWVQT,
(SEQ ID NO: 5217)
STQVQN,
(SEQ ID NO: 5218)
QSPVQN,
(SEQ ID NO: 5219)
RYSVQN,
(SEQ ID NO: 5220)
TQRVQN,
(SEQ ID NO: 5221)
SAGVQN,
(SEQ ID NO: 5222)
SAPVQT,
(SEQ ID NO: 5223)
RQSVQN,
(SEQ ID NO: 5224)
SQPVQN,
(SEQ ID NO: 5225)
VASVKN,
(SEQ ID NO: 5226)
TAWVRN,
(SEQ ID NO: 5227)
TGGGQN,
(SEQ ID NO: 5228)
STSVQN,
(SEQ ID NO: 5229)
VLGVQN,
(SEQ ID NO: 5230)
NQPVQN,
(SEQ ID NO: 5231)
LGTVQN,
(SEQ ID NO: 5232)
RAGVQN,
(SEQ ID NO: 5233)
TGGVKN,
(SEQ ID NO: 5234)
TAWLQN,
(SEQ ID NO: 5235)
TRWVQK,
(SEQ ID NO: 5236)
LAPVKN,
(SEQ ID NO: 5237)
TGSVQD,
(SEQ ID NO: 5238)
TGMVQN,
(SEQ ID NO: 5239)
LSNVQN,
(SEQ ID NO: 5240)
RLPVQN,
(SEQ ID NO: 5241)
RQGVQN,
(SEQ ID NO: 5242)
STPVQT,
(SEQ ID NO: 5243)
TTPVKN,
(SEQ ID NO: 5244)
RLTVQN,
(SEQ ID NO: 5245)
TLRVQN,
(SEQ ID NO: 5246)
SAFVQN,
(SEQ ID NO: 5247)
SVQVQN,
(SEQ ID NO: 5248)
LLPVQN,
(SEQ ID NO: 5249)
RTQVQN,
(SEQ ID NO: 5250)
TGSDQN,
(SEQ ID NO: 5251)
VASDQN,
(SEQ ID NO: 5252)
VSPVKN,
(SEQ ID NO: 5253)
LPPVQN,
(SEQ ID NO: 5254)
SSPVQT,
(SEQ ID NO: 5255)
AQPVQN,
(SEQ ID NO: 5256)
TPQVQN,
(SEQ ID NO: 5257)
TSWVQN,
(SEQ ID NO: 5258)
TGGDQN,
(SEQ ID NO: 5109)
LSPVKN,
(SEQ ID NO: 5259)
SSPVKN,
(SEQ ID NO: 5260)
NTTVQN,
(SEQ ID NO: 5261)
TTRVQN,
(SEQ ID NO: 5262)
TQWVQN,
(SEQ ID NO: 5263)
TGSVHN,
(SEQ ID NO: 5264)
TGGLQN,
(SEQ ID NO: 5265)
TAWVQK,
(SEQ ID NO: 5266)
TGRVQT,
(SEQ ID NO: 5267)
NTQVQN,
(SEQ ID NO: 5268)
TGWLQN,
(SEQ ID NO: 5269)
TYAVQN,
(SEQ ID NO: 5270)
TLSVQN,
(SEQ ID NO: 5271)
NLPVQN,
(SEQ ID NO: 5272)
TSSDQN,
(SEQ ID NO: 5273)
ATSVQN,
(SEQ ID NO: 5274)
TAWFQN,
(SEQ ID NO: 5275)
ATQVQN,
(SEQ ID NO: 5276)
VSSVKN,
(SEQ ID NO: 5107)
LSSVQN,
(SEQ ID NO: 5277)
TGSGQN,
(SEQ ID NO: 5278)
LQPVQT,
(SEQ ID NO: 5279)
VSAVKN,
(SEQ ID NO: 5280)
TQAVQN,
(SEQ ID NO: 5281)
TGWVQK,
(SEQ ID NO: 5282)
VMPVQN,
(SEQ ID NO: 5283)
TVSVQK,
(SEQ ID NO: 5284)
TAWAQN,
(SEQ ID NO: 5285)
NALVQN,
(SEQ ID NO: 5286)
RMLVQN,
(SEQ ID NO: 5287)
TVAVKN,
(SEQ ID NO: 5288)
RQLVQN,
(SEQ ID NO: 5289)
TLGVQN,
(SEQ ID NO: 5290)
LGPVQT,
(SEQ ID NO: 5291)
TGSVKN,
(SEQ ID NO: 5292)
TMSDQN,
(SEQ ID NO: 5293)
LASVKN,
(SEQ ID NO: 5294)
TGFVQN,
(SEQ ID NO: 5295)
SALVQN,
(SEQ ID NO: 5296)
TGWVKT,
(SEQ ID NO: 5297)
SQLVQN,
(SEQ ID NO: 5298)
TGWGQN,
(SEQ ID NO: 5299)
LSAVQN,
(SEQ ID NO: 5300)
TMQVQT,
(SEQ ID NO: 5301)
TGQVQN,
(SEQ ID NO: 5302)
TSPVKN,
(SEQ ID NO: 5303)
LSQVQT,
(SEQ ID NO: 5304)
TGSVLN,
(SEQ ID NO: 5305)
TNGVQN,
(SEQ ID NO: 5306)
TGWVKK,
(SEQ ID NO: 5307)
AAAVQN,
(SEQ ID NO: 5308)
SAVVQN,
(SEQ ID NO: 5309)
PGWVQH,
(SEQ ID NO: 5310)
TASDQN,
(SEQ ID NO: 5106)
LSGVQN,
(SEQ ID NO: 5311)
SSRVQN,
(SEQ ID NO: 5312)
SPPVQN,
(SEQ ID NO: 5313)
VQPVQT,
(SEQ ID NO: 5314)
TSSVKN,
(SEQ ID NO: 5315)
LSPLQN,
(SEQ ID NO: 5316)
VSQVQK,
(SEQ ID NO: 5317)
LVGVQN,
(SEQ ID NO: 5318)
TLSVKN,
(SEQ ID NO: 5319)
TGWFQK,
(SEQ ID NO: 5320)
TPAVQN,
(SEQ ID NO: 5321)
TVGVKN,
(SEQ ID NO: 5322)
KGWDQN,
(SEQ ID NO: 5323)
TAWVLN,
(SEQ ID NO: 5324)
VPPVQN,
(SEQ ID NO: 5325)
ATGVQN,
(SEQ ID NO: 5326)
TGGVQI,
(SEQ ID NO: 5327)
TGWVLN,
(SEQ ID NO: 5328)
TAWGQN,
(SEQ ID NO: 5329)
TGWVHN,
(SEQ ID NO: 5330)
LGSVQT,
(SEQ ID NO: 5331)
SANVQN,
(SEQ ID NO: 5332)
TGGVQD,
(SEQ ID NO: 5333)
TMAVKN,
(SEQ ID NO: 5334)
TASVKN,
(SEQ ID NO: 5335)
SSPVQK,
(SEQ ID NO: 5336)
TGTVQT,
(SEQ ID NO: 5337)
TGWVQI,
(SEQ ID NO: 5338)
TVWVKN,
(SEQ ID NO: 5339)
SQQVQN,
(SEQ ID NO: 5340)
VGSVQT,
(SEQ ID NO: 5341)
SSMVQN,
(SEQ ID NO: 5342)
TSPVQK,
(SEQ ID NO: 5343)
AVGVQN,
(SEQ ID NO: 5344)
VAPVQN,
(SEQ ID NO: 5345)
TLPVQK,
(SEQ ID NO: 5346)
TGRVQH,
(SEQ ID NO: 5347)
TPSVQN,
(SEQ ID NO: 5348)
TGWVEN,
(SEQ ID NO: 5349)
RGWVQN,
(SEQ ID NO: 5350)
TGSVEN,
(SEQ ID NO: 5351)
SSLVQN,
(SEQ ID NO: 5352)
TAWVKN,
(SEQ ID NO: 5353)
TYSVQN,
(SEQ ID NO: 5354)
LAAVQT,
(SEQ ID NO: 5355)
TALVKN,
(SEQ ID NO: 5356)
TGWVQY,
(SEQ ID NO: 5357)
TLPVQT,
(SEQ ID NO: 5358)
TGLVQH,
(SEQ ID NO: 5359)
TPTVQN,
(SEQ ID NO: 5360)
TASVQK,
(SEQ ID NO: 5361)
TSPVQI,
(SEQ ID NO: 5362)
IGWVQN,
(SEQ ID NO: 5363)
TGWDKN,
(SEQ ID NO: 5364)
KSSVQN,
(SEQ ID NO: 5365)
TGYVQN,
(SEQ ID NO: 5366)
RGWVQT,
(SEQ ID NO: 5367)
RSLVQN,
(SEQ ID NO: 5368)
TGGVEN,
(SEQ ID NO: 5369)
TGCVRN,
(SEQ ID NO: 5370)
LSPVQS,
(SEQ ID NO: 5371)
TGPVQT,
(SEQ ID NO: 5372)
TVGVQK,
(SEQ ID NO: 5373)
TASGQN,
(SEQ ID NO: 5374)
SVSVQN,
(SEQ ID NO: 5375)
SGPVQT,
(SEQ ID NO: 5376)
VMSVKN,
(SEQ ID NO: 5377)
LGSVQK,
(SEQ ID NO: 5378)
TGLVLN,
(SEQ ID NO: 5379)
TSNVQN,
(SEQ ID NO: 5380)
TGWGHN,
(SEQ ID NO: 5381)
SQMVQN,
(SEQ ID NO: 5382)
TVSVHN,
(SEQ ID NO: 5383)
LSSVQT,
(SEQ ID NO: 5384)
TASVRN,
(SEQ ID NO: 5385)
VPAVQN,
(SEQ ID NO: 5386)
TGRVQK,
(SEQ ID NO: 5387)
AMSVQN,
(SEQ ID NO: 5388)
TAWVHN,
(SEQ ID NO: 5389)
TGLVRN,
(SEQ ID NO: 5390)
RTLVQT,
(SEQ ID NO: 5391)
TGSIQN,
(SEQ ID NO: 5392)
LSSVKN,
(SEQ ID NO: 5393)
TLQVQK,
(SEQ ID NO: 5394)
VGSVKN,
(SEQ ID NO: 5395)
LAPLQN,
(SEQ ID NO: 5396)
TPGVQN,
(SEQ ID NO: 5397)
LSAVQT,
(SEQ ID NO: 5398)
TGVVQN,
(SEQ ID NO: 5399)
VPQVQN,
(SEQ ID NO: 5400)
TGCVQK,
(SEQ ID NO: 5401)
TRWVQT,
(SEQ ID NO: 5402)
TGLDQN,
(SEQ ID NO: 5403)
VSSVHN,
(SEQ ID NO: 5404)
KGWVQT,
(SEQ ID NO: 5405)
SLPVQN,
(SEQ ID NO: 5406)
TTSVHN,
(SEQ ID NO: 5407)
TVWVQN,
(SEQ ID NO: 5408)
TAQLQN,
(SEQ ID NO: 5409)
TRWVKN,
(SEQ ID NO: 5410)
TAWIQN,
(SEQ ID NO: 5411)
LSQVKN,
(SEQ ID NO: 5412)
TSTVKN,
(SEQ ID NO: 5413)
ALPVQN,
(SEQ ID NO: 5414)
TSMVQT,
(SEQ ID NO: 5415)
TSSVQH,
(SEQ ID NO: 5416)
TAMVKN,
(SEQ ID NO: 5417)
TPWVQN,
(SEQ ID NO: 5418)
TPRVQN,
(SEQ ID NO: 5419)
SSSVQN,
(SEQ ID NO: 5420)
RPPVQN,
(SEQ ID NO: 5421)
LAGVKN,
(SEQ ID NO: 5422)
TSPAQN,
(SEQ ID NO: 5423)
RSPVQT,
(SEQ ID NO: 5424)
TGWVPH,
(SEQ ID NO: 5425)
PGWGQN,
(SEQ ID NO: 5426)
IPPVQN,
(SEQ ID NO: 5427)
TGRVKN,
(SEQ ID NO: 5428)
TGRLQN,
(SEQ ID NO: 5429)
LSSVQH,
(SEQ ID NO: 5430)
AGWVQT,
(SEQ ID NO: 5431)
TGLVQS,
(SEQ ID NO: 5432)
TGCVQI,
(SEQ ID NO: 5433)
RPGVQN,
(SEQ ID NO: 5434)
TAAVQH,
(SEQ ID NO: 5435)
TGCDQN,
(SEQ ID NO: 5436)
TGRVRN,
(SEQ ID NO: 5437)
TGRDQN;
(ii)
(SEQ ID NO: 5047)
TTKVQN,
(SEQ ID NO: 5013)
TMKVQN,
(SEQ ID NO: 5062)
VAQVQN,
(SEQ ID NO: 4978)
TAWDQN,
(SEQ ID NO: 4992)
TGSVQH,
(SEQ ID NO: 5072)
VKQVQN,
(SEQ ID NO: 4854)
SAPVQN,
(SEQ ID NO: 4912)
LSKVQN,
(SEQ ID NO: 4891)
LAPVQN,
(SEQ ID NO: 4893)
LAQVQN,
(SEQ ID NO: 4968)
TAKVQN,
(SEQ ID NO: 4955)
SAKVQN,
(SEQ ID NO: 4982)
TGCFQN,
(SEQ ID NO: 5026)
TQKVQN,
(SEQ ID NO: 5052)
TVAVQN,
(SEQ ID NO: 4914)
LSPVQN,
(SEQ ID NO: 5050)
TTQVQN,
(SEQ ID NO: 4973)
TAQVQN,
(SEQ ID NO: 4934)
RIAVQN,
(SEQ ID NO: 4931)
RASVQN,
(SEQ ID NO: 5048)
TTPVQN,
(SEQ ID NO: 4853)
LTPVQN,
(SEQ ID NO: 4963)
STPVQN,
(SEQ ID NO: 4861)
TSPVQN,
(SEQ ID NO: 5016)
TMQVQN,
(SEQ ID NO: 5036)
TSKVQN,
(SEQ ID NO: 5092)
VSQVQN,
(SEQ ID NO: 4868)
VSPVQN,
(SEQ ID NO: 5055)
TVQVQN,
(SEQ ID NO: 5097)
VTAVQN,
(SEQ ID NO: 4941)
RQPVQN,
(SEQ ID NO: 4884)
ISGVQN,
(SEQ ID NO: 5087)
VRPVQN,
(SEQ ID NO: 4897)
LGPVQN,
(SEQ ID NO: 5022)
TNQVQN,
(SEQ ID NO: 5084)
VQQVQN,
(SEQ ID NO: 5061)
VANVQN,
(SEQ ID NO: 4870)
AAPVQN,
(SEQ ID NO: 4947)
RSTVQN,
(SEQ ID NO: 5011)
TMAVQN,
(SEQ ID NO: 4882)
IQPVQN,
(SEQ ID NO: 4878)
IASVQN,
(SEQ ID NO: 4867)
TVSVQN,
(SEQ ID NO: 4933)
RGSVQN,
(SEQ ID NO: 4925)
NSPVQN,
(SEQ ID NO: 4908)
LQPVQN,
(SEQ ID NO: 5098)
VTGVQN,
(SEQ ID NO: 5076)
VMQVQN,
(SEQ ID NO: 4959)
SMAVQN,
(SEQ ID NO: 5066)
VGKVQN,
(SEQ ID NO: 4883)
IQSVQN,
(SEQ ID NO: 4874)
CSPVQN,
(SEQ ID NO: 4910)
LQRVQN,
(SEQ ID NO: 4979)
TAWVQH,
(SEQ ID NO: 5024)
TPPVQN,
(SEQ ID NO: 5099)
VTKVQN,
(SEQ ID NO: 4855)
SSPVQN,
(SEQ ID NO: 4871)
AGPVQN,
(SEQ ID NO: 4894)
LARVQN,
(SEQ ID NO: 5051)
TTTVQN,
(SEQ ID NO: 4984)
TGGFQN,
(SEQ ID NO: 5010)
TLQVQN,
(SEQ ID NO: 5018)
TMSVQN,
(SEQ ID NO: 5060)
VAKVQN,
(SEQ ID NO: 4929)
RAAVQN,
(SEQ ID NO: 5054)
TVGVQN,
(SEQ ID NO: 4907)
LNPVQN,
(SEQ ID NO: 4915)
LSQVQN,
(SEQ ID NO: 5006)
TKPVQN,
(SEQ ID NO: 5021)
TNAVQN,
(SEQ ID NO: 4896)
LATVQN,
(SEQ ID NO: 5100)
VTPVQN,
(SEQ ID NO: 5081)
VQAVQN,
(SEQ ID NO: 4860)
TTSVQN,
(SEQ ID NO: 4875)
CTPVQN,
(SEQ ID NO: 4967)
TAGVQN,
(SEQ ID NO: 5040)
TSQVQN,
(SEQ ID NO: 5014)
TMNVQN,
(SEQ ID NO: 5043)
TSTVQN,
(SEQ ID NO: 5071)
VKPVQN,
(SEQ ID NO: 4872)
ASPVQN,
(SEQ ID NO: 5058)
VAAVQN,
(SEQ ID NO: 4901)
LKSVQN,
(SEQ ID NO: 4876)
IAAVQN,
(SEQ ID NO: 4966)
TAAVQN,
(SEQ ID NO: 5005)
TKAVQN,
(SEQ ID NO: 4994)
TGSVQS,
(SEQ ID NO: 5090)
VSNVQN,
(SEQ ID NO: 4971)
TAPVQN,
(SEQ ID NO: 4904)
LMPVQN,
(SEQ ID NO: 4900)
LHPVQN,
(SEQ ID NO: 4930)
RAQVQN,
(SEQ ID NO: 4919)
LTNVQN,
(SEQ ID NO: 4952)
RTTVQN,
(SEQ ID NO: 5044)
TSVVQN,
(SEQ ID NO: 4939)
RMSVQN,
(SEQ ID NO: 5067)
VGNVQN,
(SEQ ID NO: 4905)
LMQVQN,
(SEQ ID NO: 4976)
TATVQN,
(SEQ ID NO: 5069)
VHPVQN,
(SEQ ID NO: 5091)
VSPVQT,
(SEQ ID NO: 4886)
ISSVQN,
(SEQ ID NO: 5063)
VASVQN,
(SEQ ID NO: 5032)
TRWDQN,
(SEQ ID NO: 5020)
TMTVQN,
(SEQ ID NO: 4946)
RSSVQN,
(SEQ ID NO: 4863)
TAWVQN,
(SEQ ID NO: 4949)
RTGVQN,
(SEQ ID NO: 5064)
VATVQN,
(SEQ ID NO: 5101)
VTSVQN,
(SEQ ID NO: 4869)
VSSVQN,
(SEQ ID NO: 5023)
TNSVQN,
(SEQ ID NO: 5070)
VKAVQN,
(SEQ ID NO: 4958)
SGPVQN,
(SEQ ID NO: 4989)
TGPVQN,
(SEQ ID NO: 4969)
TAMVQN,
(SEQ ID NO: 5029)
TQPVQN,
(SEQ ID NO: 5030)
TQQVQN,
(SEQ ID NO: 5093)
VSRVQN,
(SEQ ID NO: 5002)
TGWVQP,
(SEQ ID NO: 5088)
VSAVQN,
(SEQ ID NO: 5074)
VLSVQN,
(SEQ ID NO: 5025)
TQHVQN,
(SEQ ID NO: 4895)
LASVQN,
(SEQ ID NO: 4928)
QAPVQN,
(SEQ ID NO: 4922)
NAQVQN,
(SEQ ID NO: 4873)
ATPVQN,
(SEQ ID NO: 5083)
VQPVQN,
(SEQ ID NO: 5045)
TTAVQN,
(SEQ ID NO: 5004)
TGWVRN,
(SEQ ID NO: 4852)
LAAVQN,
(SEQ ID NO: 5039)
TSPDQN,
(SEQ ID NO: 4943)
RSGVQN,
(SEQ ID NO: 4988)
TGGVQT,
(SEQ ID NO: 5000)
TGWVPN,
(SEQ ID NO: 5049)
TTPVQT,
(SEQ ID NO: 4902)
LMAVQN,
(SEQ ID NO: 5015)
TMPVQN,
(SEQ ID NO: 4890)
LANVQN,
(SEQ ID NO: 5096)
VSTVQN,
(SEQ ID NO: 4957)
SAQVQN,
(SEQ ID NO: 4926)
NTPVQN,
(SEQ ID NO: 5095)
VSSVQT,
(SEQ ID NO: 5056)
TVSVKN,
(SEQ ID NO: 5102)
TGLVQN,
(SEQ ID NO: 4865)
TGSVQN,
(SEQ ID NO: 4983)
TGGAQN,
(SEQ ID NO: 4977)
TAVVQN,
(SEQ ID NO: 4937)
RLGVQN,
(SEQ ID NO: 4950)
RTLVQN,
(SEQ ID NO: 5027)
TQMVQN,
(SEQ ID NO: 4887)
ITPVQN,
(SEQ ID NO: 5057)
TVWVQK,
(SEQ ID NO: 4942)
RSAVQN,
(SEQ ID NO: 4974)
TASVQN,
(SEQ ID NO: 5012)
TMGVQN,
(SEQ ID NO: 4986)
TGGVQH,
(SEQ ID NO: 5085)
VQSVQN,
(SEQ ID NO: 4864)
TGGVQN,
(SEQ ID NO: 4885)
ISPVQN,
(SEQ ID NO: 5103)
TGWVKN,
(SEQ ID NO: 4990)
TGSAQN,
(SEQ ID NO: 4857)
TGWAQN,
(SEQ ID NO: 5019)
TMSVQT,
(SEQ ID NO: 5065)
VGGVQN,
(SEQ ID NO: 4892)
LAPVQT,
(SEQ ID NO: 4862)
TALVQN,
(SEQ ID NO: 4888)
LAGVQN,
(SEQ ID NO: 4948)
RTAVQN,
(SEQ ID NO: 4944)
RSPVQN,
(SEQ ID NO: 4859)
TLAVQN,
(SEQ ID NO: 4889)
LAHVQN,
(SEQ ID NO: 5037)
TSLVQN,
(SEQ ID NO: 4938)
RLSVQN,
(SEQ ID NO: 4903)
LMGVQN,
(SEQ ID NO: 4961)
SMQVQN,
(SEQ ID NO: 5031)
TQTVQN,
(SEQ ID NO: 4997)
TGWEQN,
(SEQ ID NO: 5068)
VGSVQN,
(SEQ ID NO: 5089)
VSGVQN,
(SEQ ID NO: 5075)
VMAVQN,
(SEQ ID NO: 4879)
IGGVQN,
(SEQ ID NO: 4877)
IAGVQN,
(SEQ ID NO: 4856)
TGRVQN,
(SEQ ID NO: 4911)
LSHVQN,
(SEQ ID NO: 5086)
VQTVQN,
(SEQ ID NO: 4866)
TGWDQN,
(SEQ ID NO: 4940)
RNSVQN,
(SEQ ID NO: 5009)
TLPVQN,
(SEQ ID NO: 5007)
TKQVQN,
(SEQ ID NO: 4898)
LGQVQN,
(SEQ ID NO: 4924)
NMQVQN,
(SEQ ID NO: 4927)
NVQVQN,
(SEQ ID NO: 4993)
TGSVQI,
(SEQ ID NO: 4932)
RGGVQN,
(SEQ ID NO: 5077)
VMSVQN,
(SEQ ID NO: 5046)
TTGVQN,
(SEQ ID NO: 4913)
LSPVQK,
(SEQ ID NO: 4916)
LSRVQN,
(SEQ ID NO: 5094)
VSSVQK,
(SEQ ID NO: 4972)
TAPVQT,
(SEQ ID NO: 4921)
MAPVQN,
(SEQ ID NO: 4881)
ILGVQN,
(SEQ ID NO: 4975)
TASVQT,
(SEQ ID NO: 4991)
TGSLQN,
(SEQ ID NO: 4996)
TGTVQN,
(SEQ ID NO: 4995)
TGSVQT,
(SEQ ID NO: 5042)
TSSVQT,
(SEQ ID NO: 5035)
TSHVQN,
(SEQ ID NO: 4935)
RIGVQN,
(SEQ ID NO: 4999)
TGWGQT,
(SEQ ID NO: 4956)
SAMVQN,
(SEQ ID NO: 5038)
TSMVQN,
(SEQ ID NO: 4960)
SMGVQN,
(SEQ ID NO: 4962)
SMSVQN,
(SEQ ID NO: 5041)
TSSVQN,
(SEQ ID NO: 5034)
TSGVQN,
(SEQ ID NO: 4981)
TGAVQN,
(SEQ ID NO: 5080)
VNSVQN,
(SEQ ID NO: 5059)
VAGVQN,
(SEQ ID NO: 4880)
IGSVQN,
(SEQ ID NO: 4899)
LGSVQN,
(SEQ ID NO: 5079)
VNGVQN,
(SEQ ID NO: 4918)
LTAVQN,
(SEQ ID NO: 5082)
VQNVQN,
(SEQ ID NO: 5008)
TKSVQN,
(SEQ ID NO: 4965)
SVGVQN,
(SEQ ID NO: 4980)
TAWVQT,
(SEQ ID NO: 4923)
NASVQN,
(SEQ ID NO: 5033)
TSAVQN,
(SEQ ID NO: 5017)
TMSVKN,
(SEQ ID NO: 4970)
TANVQN,
(SEQ ID NO: 4998)
TGWFQN,
(SEQ ID NO: 4985)
TGGVLN,
(SEQ ID NO: 4920)
LTSVQN,
(SEQ ID NO: 5003)
TGWVQT,
(SEQ ID NO: 4945)
RSQVQN,
(SEQ ID NO: 4936)
RIPVQN,
(SEQ ID NO: 5001)
TGWVQD,
(SEQ ID NO: 4953)
RVEVQN,
(SEQ ID NO: 5073)
VLPVQN,
(SEQ ID NO: 4987)
TGGVQK,
(SEQ ID NO: 4964)
SVAVQN,
(SEQ ID NO: 4909)
LQQVQN,
(SEQ ID NO: 4917)
LSTVQN,
(SEQ ID NO: 4954)
SAAVQN,
(SEQ ID NO: 4951)
RTSVQN,
(SEQ ID NO: 5028)
TQNVQN,
(SEQ ID NO: 5078)
VNAVQN,
(SEQ ID NO: 5053)
TVAVQT,
(SEQ ID NO: 4906)
LMSVQN,
(SEQ ID NO: 4851)
TGWVQN;

[0288] (iii) amino acid sequence comprising any portion of an amino acid sequence in (i) or (ii), e.g., any 2, 3, 4, or 5 amino acids, e.g., consecutive amino acids, thereof;
[0289] (iv) an amino acid sequence comprising at least one, two, or three but no more than four modifications, e.g., substitutions (e.g., conservative substitutions), insertions, or deletions, relative to any of the amino acid sequences in (i) or (ii); or
[0290] (v) an amino acid sequence comprising at least one, two, or three but no more than four different amino acids, relative to any one of the amino acid sequences in (i) or (ii).
   187. The isolated AAV particle of any one of embodiments 176-186, wherein [D][E] is or comprises TGWVQN (SEQ ID NO: 4851), TGWVPN (SEQ ID NO: 5000), or LSPVKN (SEQ ID NO: 5109).
   188. The isolated AAV particle of any one of embodiments 176-187, wherein:
[0291] (i) [B] is or comprises: VHLY (SEQ ID NO: 4680), VHHY (SEQ ID NO: 4683), VHIY (SEQ ID NO: 4681), VNLY (SEQ ID NO: 4724), VQLY (SEQ ID NO: 4729), IHLY (SEQ ID NO: 4730), LHLY (SEQ ID NO: 4727), VPLY (SEQ ID NO: 4723), VDLY (SEQ ID NO: 4731), AHLY (SEQ ID NO: 4732), VHRY (SEQ ID NO: 4725), FHLY (SEQ ID NO: 4726), DHLY (SEQ ID NO: 4728), VLLY (SEQ ID NO: 4733), GHLY (SEQ ID NO: 4734), VRLY (SEQ ID NO: 4735), VHVY (SEQ ID NO: 4682), or VYLY (SEQ ID NO: 4736);
[0292] (ii) [C] is or comprises: AQAQ (SEQ ID NO: 4737), AQPQ (SEQ ID NO: 4739), AKAQ (SEQ ID NO: 4741), DQAQ (SEQ ID NO: 4744), SQAQ (SEQ ID NO: 4738), AHAQ (SEQ ID NO: 4742), AQEQ (SEQ ID NO: 4748), AQAK (SEQ ID NO: 4746), ALAQ (SEQ ID NO: 4749), APAQ (SEQ ID NO: 4745), ARAQ (SEQ ID NO: 4750), AQAH (SEQ ID NO: 4747), AQAP (SEQ ID NO: 4743), or TQAQ (SEQ ID NO: 4751);
[0293] (iii) [D] is or comprises: TTK, TMK, VAQ, TAW, TGS, VKQ, SAP, LSK, LAP, LAQ, TAK, SAK, TGC, TQK, TVA, LSP, TTQ, TAQ, RIA, RAS, TTP, LTP, STP, TSP, TMQ, TSK, VSQ, VSP, TVQ, VTA, RQP, ISG, VRP, LGP, TNQ, VQQ, VAN, AAP, RST, TMA, IQP, IAS, TVS, RGS, NSP, LQP, VTG, VMQ, SMA, VGK, IQS, CSP, LQR, TPP, VTK, SSP, AGP, LAR, TTT, TGG, TLQ, TMS, VAK, RAA, TVG, LNP, LSQ, TKP, TNA, LAT, VTP, VQA, TTS, CTP, TAG, TSQ, TMN, TST, VKP, ASP, VAA, LKS, IAA, TAA, TKA, VSN, TAP, LMP, LHP, RAQ, LTN, RTT, TSV, RMS, VGN, LMQ, TAT, VHP, ISS, VAS, TRW, TMT, RSS, RTG, VAT, VTS, VSS, TNS, VKA, SGP, TGP, TAM, TQP, TQQ, VSR, TGW, VSA, VLS, TQH, LAS, QAP, NAQ, ATP, VQP, TTA, LAA, RSG, LMA, TMP, LAN, VST, SAQ, NTP, TGL, TAV, RLG, RTL, TQM, ITP, TVW, RSA, TAS, TMG, VQS, ISP, VGG, TAL, LAG, RTA, RSP, TLA, LAH, TSL, RLS, LMG, SMQ, TQT, VGS, VSG, VMA, IGG, IAG, TGR, LSH, VQT, RNS, TLP, TKQ, LGQ, NMQ, NVQ, RGG, VMS, TTG, LSR, MAP, ILG, TGT, TSS, TSH, RIG, SAM, TSM, SMG, SMS, TSG, TGA, VNS, VAG, IGS, LGS, VNG, LTA, VQN, TKS, SVG, NAS, TSA, TAN, LTS, RSQ, RIP, RVE, VLP, SVA, LQQ, LST, SAA, RTS, TQN, VNA, LMS, TMM, RSV, TQL, RTP, RQQ, VQG, PGW, STQ, QSP, RYS, TQR, SAG, RQS, SQP, STS, VLG, NQP, LGT, RAG, TGM, LSN, RLP, RQG, RLT, TLR, SAF, SVQ, LLP, RTQ, LPP, AQP, TPQ, TSW, NTT, TTR, TQW, NTQ, TYA, TLS, NLP, ATS, ATQ, LSS, TQA, VMP, NAL, RML, RQL, TLG, TGF, SAL, SQL, LSA, TGQ, TNG, AAA, SAV, LSG, SSR, SPP, LVG, TPA, KGW, VPP, ATG, SAN, SQQ, SSM, AVG, VAP, TPS, RGW, SSL, TYS, TPT, IGW, KSS, TGY, RSL, SVS, TSN, SQM, VPA, AMS, TPG, TGV, VPQ, SLP, ALP, TPW, TPR, SSS, RPP, IPP, AGW, or RPG; and/or
[0294] (iv) [E] is or comprises: VQN, DQN, VQH, FQN, VQS, VQT, VQP, VRN, VPN, VKN, AQN, VQK, EQN, VQI, LQN, GQT, VLN, VQD, VHN, GQN, VKT, VKK, FQK, VEN, VQY, DKN, GHN, IQN, or VPH.
   189. The isolated AAV particle of any one of embodiments 95-100, wherein:
[0295] (i) [B] is or comprises: VHLY (SEQ ID NO: 4680), VHHY (SEQ ID NO: 4683), or VHIY (SEQ ID NO: 4681);
[0296] (ii) [C] is or comprises: AQAQ (SEQ ID NO: 4737), AQPQ (SEQ ID NO: 4739), AKAQ (SEQ ID NO: 4741), DQAQ (SEQ ID NO: 4744), or SQAQ (SEQ ID NO: 4738);
[0297] (iii) [D] is or comprises: TTK, TMK, VAQ, TAW, TGS, VKQ, SAP, LSK, LAP, LAQ, TAK, SAK, TGC, TQK, TVA, LSP, TTQ, TAQ, RIA, RAS, TTP, LTP, STP, TSP, TMQ, TSK, VSQ, VSP, TVQ, VTA, RQP, ISG, VRP, LGP, TNQ, VQQ, VAN, AAP, RST, TMA, IQP, IAS, TVS, RGS, NSP, LQP, VTG, VMQ, SMA, VGK, IQS, CSP, LQR, TPP, VTK, SSP, AGP, LAR, TTT, TGG, TLQ, TMS, VAK, RAA, TVG, LNP, LSQ, TKP, TNA, LAT, VTP, VQA, TTS, CTP, TAG, TSQ, TMN, TST, VKP, ASP, VAA, LKS, IAA, TAA, TKA, VSN, TAP, LMP, LHP, RAQ, LTN, RTT, TSV, RMS, VGN, LMQ, TAT, VHP, ISS, VAS, TRW, TMT, RSS, RTG, VAT, VTS, VSS, TNS, VKA, SGP, TGP, TAM, TQP, TQQ, VSR, TGW, VSA, VLS, TQH, LAS, QAP, NAQ, ATP, VQP, TTA, LAA, RSG, LMA, TMP, LAN, VST, SAQ, NTP, TGL, TAV, RLG, RTL, TQM, ITP, TVW, RSA, TAS, TMG, VQS, ISP, VGG, TAL, LAG, RTA, RSP, TLA, LAH, TSL, RLS, LMG, SMQ, TQT, VGS, VSG, VMA, IGG, IAG, TGR, LSH, VQT, RNS, TLP, TKQ, LGQ, NMQ, NVQ, RGG, VMS, TTG, LSR, MAP, ILG, TGT, TSS, TSH, RIG, SAM, TSM, SMG, SMS, TSG, TGA, VNS, VAG, IGS, LGS, VNG, LTA, VQN, TKS, SVG, NAS, TSA, TAN, LTS, RSQ, RIP, RVE, VLP, SVA, LQQ, LST, SAA, RTS, TQN, VNA, or LMS; and/or
[0298] (iv) [E] is or comprises: VQN, DQN, VQH, FQN, VQS, VQT, VQP, VRN, VPN, VKN, AQN, VQK, EQN, VQI, LQN, GQT, VLN, or VQD.
   190. The isolated AAV particle of any one of embodiments 176-189, wherein [A][B][C][D][E] comprises:
[0299] (i) the amino acid sequence of any of SEQ ID NOs: 143, 148, 149, 151, 153, 154-158, 160-163, 166, 168, 170, 171, 173-175, 177-179, 181, 182, 184-188, 191-197, 199-210, 212-215, 217-225, 227-231, 233, 234, 236-240, 243-262, 265, 267, 268, 270-277, 279, 282, 284-286, 288-293, 295, 296, 298, 300-314, 316-327, 329, 331, 332, 334, 336, 337-344, 346-350, 352-354, 356-365, 367, 369, 371-380, 382-385, 387, 392-394, 396, 397, 399-401, 404-411, 413-415, 417, 419-429, 432, 433, 435-437, 438, 440-442, 444-447, 450-454, 456, 458-461, 464, 465, 467-469, 471-484, 487-495, 497, 498, 500-503, 505, 507-512, 514-517, 522-525, 528-539, 542-545, 547, 551-555, 558-561, 563-568, 570, 573, 574, 576, 579, 581, 582, 584, 586, 587, 591-596, 598, 601, 604, 605, 606, 607, 610, 612, 614-619, 624-629, 631-636, 640, 641, 645, 646, 649, 650, 656, 658, 661, 663, 664, 666, 668, 669, 670, 672, 673, 674, 675, 677, 679, 683, 684, 686, 688, 689, 691, 693, 695, 696, 697, 699, 700, 701, 702, 704-706, 709-714, 720, 722, 725-731, 733, 736, 740, 745, 749-752, 754, 755, 757, 758, 760-765, 767, 768, 770, 771, 773, 778-780, 783-788, 792-794, 797-799, 801, 802, 804-806, 812, 814, 815, 817, 818, 820, 821, 824, 828, 831, 832, 834-837, 839, 840-845, 847, 848, 850-855, 857-859, 861, 862, 865, 866, 869-872, 874-876, 882-884, 887, 889-895, 897, 899, 901, 903-905, 907, 908, 910, 911, 913, 915, 919, 920, 923, 924, 926, 927, 929, 931-933, 935, 937, 939-949, 952-955, 957, 958, 960, 962, 964, 965, 967, 971, 973, 974, 976, 977, 981, 985-989, 992, 994, 997-1000, 1002, 1004, 1006-1008, 1010, 1013, 1015, 1017, 1018, 1020, 1021, 1023-1025, 1027, 1029-1031, 1033-1035, 1037-1040, 1043, 1046, 1049, 1052, 1053, 1056, 1057, 1059, 1062, 1064, 1065, 1067, 1068, 1070, 1073, 1075, 1077-1080, 1083-1087, 1089, 1090, 1093, 1094, 1097, 1100, 1101, 1103, 1105-1107, 1110-1112, 1114-1117, 1119, 1121, 1125, 1126, 1129, 1132, 1133, 1135;
[0300] (ii) an amino acid sequence comprising any portion of an amino acid sequence in (i), e.g., any 2, 3, 4, 5, 6, 7, 8, 9, 10, 11, 12, 13, 14, 15, 16, 17, or 18 amino acids, e.g., consecutive amino acids, thereof;
[0301] (iii) an amino acid sequence comprising at least one, two, or three but no more than four modifications, e.g., substitutions (e.g., conservative substitutions), insertions, or deletions, relative to any of the amino acid sequences in (i); or
[0302] (iv) an amino acid sequence comprising at least one, two, or three but no more than four different amino acids, relative to any one of the amino acid sequences in (i).
   191. The isolated AAV particle of any one of embodiments 176-190, wherein [A][B][C][D][E] comprises:
[0303] (i) the amino acid sequence of any of SEQ ID NOs: 139, 143, 148, 149, 151, 153-158, 160-163, 166, 168, 170, 171, 173-175, 177-179, 181, 182, 184-188, 191-197, 199, 200, 201-210, 212-215, 217-225, 227-231, 233, 234, 236-240, 243-262, 265, 267, 268, 270-277, 279, 282, 284-286, 288-293, 295, 296, 298, 300-314, 316-327, 329, 331, 332, 334, 336, 337-344, 346-350, 352-354, 356-365, 367, 369, 371-380, 382-385, 387, 392-394, 396, 397, 399-401, 404, 405, 406-411, 413-415, 417, 419-429, 432, 433, 435-438, 440-442, 444-447, 450-454, 456, 458-461, 464, 465, 467-469, or 471-476;
[0304] (ii) an amino acid sequence comprising any portion of an amino acid sequence in (i), e.g., any 2, 3, 4, 5, 6, 7, 8, 9, 10, 11, 12, 13, 14, 15, 16, 17, or 18 amino acids, e.g., consecutive amino acids, thereof;
[0305] (iii) an amino acid sequence comprising at least one, two, or three but no more than four modifications, e.g., substitutions (e.g., conservative substitutions), insertions, or deletions, relative to any of the amino acid sequences in (i); or
[0306] (iv) an amino acid sequence comprising at least one, two, or three but no more than four different amino acids, relative to any one of the amino acid sequences in (i).
   192. The isolated AAV particle of any one of embodiments 176-191, wherein [A][B][C][D][E] comprises the amino acid sequence of PLNGAVHLYAQAQTGWVPN (SEQ ID NO: 314).
   193. The isolated AAV particle of any one of embodiments 176-191, wherein [A][B][C][D][E] comprises the amino acid sequence of PLNGAVHLYAQAQLSPVKN (SEQ ID NO: 566).
   194. The isolated AAV particle of any one of embodiments 176-191, wherein [A][B][C][D][E] comprises the amino acid sequence the amino acid sequence of PLNGAVHLYAQAQTGWVQN (SEQ ID NO: 476).
   195. The isolated AAV particle of any one of embodiments 137-194, wherein [A][B] is present in loop VIII.
   196. The isolated AAV particle of any one of embodiments 176-195, wherein [C], [D], and/or [E] is present in loop VIII.
   197. The isolated AAV particle of any one of embodiments 176-196, wherein [A][B][C][D][E] is present in loop VIII.
   198. The isolated AAV particle of any one of embodiments 176-197, which comprises an amino acid other than A at position 587 and/or an amino acid other than Q at position 588, numbered according to SEQ ID NO: 138.
   199. The isolated AAV particle of any one of embodiments 176-198, which comprises:
[0307] (i) the amino acid P at position 587, numbered according to SEQ ID NO: 5, 8, 138, or 3636; and/or
[0308] (ii) the amino acid L at position 588, numbered according to SEQ ID NO: 5, 8, 138, or 3636.
   200. The isolated AAV particle of any one of embodiments 137-199, wherein [A] is present immediately subsequent to position 586, relative to a reference sequence numbered according to the amino acid sequence of SEQ ID NO: 5, 8, 138, or 3636.
   201. The isolated AAV particle of any one of embodiments 137-200, wherein [A] is present immediately subsequent to position 586, and replaces positions 587 and 588 (e.g., A587 and Q588), numbered according to SEQ ID NO: 138.
   202. The isolated AAV particle of any one of embodiments 137-201, wherein [A] replaces positions 587 and 588 (e.g., A587 and Q588), numbered according to SEQ ID NO: 138.
   203. The isolated AAV particle of any one of embodiments 137-202, wherein [A] corresponds to positions 587-591 of SEQ ID NO: 5, 8, or 3636.
   204. The isolated AAV particle of any one of embodiments 137-203, wherein [B] is present immediately subsequent to [A].
   205. The isolated AAV particle of any one of embodiments 137-204, wherein [B] is present immediately subsequent to [A], wherein [A] is present immediately subsequent to position 586, relative to a reference sequence numbered according to the amino acid sequence of SEQ ID NO: 5, 8, 138, or 3636.
   206. The isolated AAV particle of any one of embodiments 137-205, wherein [B] is present immediately subsequent to [A], wherein [A] is present immediately subsequent to position 586 and replaces positions 587 and 588 (e.g., A587 and Q588), numbered according to SEQ ID NO: 138.
   207. The isolated AAV particle of any one of embodiments 137-206, wherein [B] corresponds to positions 592 to 595 of SEQ ID NO: 5, 8, or 3636.
   208. The isolated AAV particle of any one of embodiments 137-207, wherein [A][B] replaces positions 587 and 588 (e.g., A587 and Q588), numbered according to SEQ ID NO: 138.
   209. The isolated AAV particle of any one of embodiments 137-208, wherein [A][B] is present immediately subsequent to position 586, numbered according to SEQ ID NO: 138.
   210. The isolated AAV particle of any one of embodiments 137-209, wherein [A][B] is present immediately subsequent to position 586 and replaces positions 587 and 588 (e.g., A587 and Q588), numbered according to SEQ ID NO: 138.
   211. The isolated AAV particle of any one of embodiments 137-210, wherein [A][B] corresponds to positions 587-595 of SEQ ID NO: 5, 8, or 3636.
   212. The isolated AAV particle of any one of embodiments 149-211, wherein [C] is present immediately subsequent to position 588, relative to a reference sequence numbered according to the amino acid sequence of SEQ ID NO: 138.
   213. The isolated AAV particle of any one of embodiments 149-212, wherein [C] replaces positions 589-592 (e.g., A589, Q590, A591, Q592), numbered according to the amino acid sequence of SEQ ID NO: 138.
   214. The isolated AAV particle of any one of embodiments 149-213, wherein [C] is present immediately subsequent to position 588, and replaces positions 589-592 (e.g., A589, Q590, A591, Q592), numbered according to the amino acid sequence of SEQ ID NO: 138.
   215. The isolated AAV particle of any one of embodiments 149-214, wherein [C] corresponds to positions 596-599 of SEQ ID NO: 5, 8, or 3636.
   216. The isolated AAV particle of any one of embodiments 149-215, wherein [A][B][C] is present immediately subsequent to position 586, numbered according to SEQ ID NO: 138.
   217. The isolated AAV particle of any one of embodiments 149-216, wherein [A][B][C] replaces positions 587-592 (e.g., A587, Q588, A589, Q590, A591, Q592), numbered according to SEQ ID NO: 138.
   218. The isolated AAV particle of any one of embodiments 149-217, wherein [A][B][C] is present immediately subsequent to position 586 and replaces positions 587-592 (e.g., A587, Q588, A589, Q590, A591, Q592), numbered according to SEQ ID NO: 138.
   219. The isolated AAV particle of any one of embodiments 149-218, wherein [A][B][C] corresponds to positions 587-599 of SEQ ID NO: 5, 8, or 3636.
   220. The isolated AAV particle of any one of embodiments 165-219, wherein [D] is present immediately subsequent to position 592, relative to a reference sequence numbered according to the amino acid sequence of SEQ ID NO: 138.
   221. The isolated AAV particle of any one of embodiments 165-220, wherein [D] replaces positions 593-595 (e.g., T593, G594, W595), numbered according to the amino acid sequence of SEQ ID NO: 138.
   222. The isolated AAV particle of any one of embodiments 165-221, wherein [D] is present immediately subsequent to position 592, and replaces positions 593-595 (e.g., T593, G594, W595), numbered according to the amino acid sequence of SEQ ID NO: 138.
   223. The isolated AAV particle of any one of embodiments 165-222, wherein [D] corresponds to positions 600-602 of SEQ ID NO: 5, 8, or 3636.
   224. The isolated AAV particle of any one of embodiments 165-223, wherein [C][D] is present immediately subsequent to position 588, numbered according to SEQ ID NO: 138.
   225. The isolated AAV particle of any one of embodiments 165-224, wherein [C][D] replaces positions 589-595 (e.g., A589, Q590, A591, Q592, T593, G594, W595), numbered according to the amino acid sequence of SEQ ID NO: 138.
   226. The isolated AAV particle of any one of embodiments 165-225, wherein [C][D] is present immediately subsequent to 588, and replaces positions 589-595 (e.g., A589, Q590, A591, Q592, T593, G594, W595), numbered according to the amino acid sequence of SEQ ID NO: 138.
   227. The isolated AAV particle of any one of embodiments 165-226, wherein [C][D] corresponds to positions 596-602 of SEQ ID NO: 5, 8, or 3636.
   228. The isolated AAV particle of any one of embodiments 165-227, wherein [A][B][C][D] is present immediately subsequent to position 586, numbered according to SEQ ID NO: 5, 8, 138, or 3636.
   229. The isolated AAV particle of any one of embodiments 165-228, wherein [A][B][C][D] replaces positions 587-595 (e.g., A587, Q588, A589, Q590, A591, Q592, T593, G594, W595), numbered according to SEQ ID NO: 138.
   230. The isolated AAV particle of any one of embodiments 165-229, wherein [A][B][C][D] is present immediately subsequent to position 586 and replaces positions 587-595 (e.g., A587, Q588, A589, Q590, A591, Q592, T593, G594, W595), numbered according to SEQ ID NO: 138.
   231. The isolated AAV particle of any one of embodiments 176-230, wherein [A][B][C][D] corresponds to positions 587-602 of SEQ ID NO: 5, 8, or 3636.
   232. The isolated AAV particle of any one of embodiments 95-231, wherein [E] is present immediately subsequent to position 595, relative to a reference sequence numbered according to the amino acid sequence of SEQ ID NO: 138.
   233. The isolated AAV particle of any one of embodiments 176-232, wherein [E] replaces positions 596-598 (e.g., V5%, Q597, N598), numbered according to the amino acid sequence of SEQ ID NO: 138.
   234. The isolated AAV particle of any one of embodiments 176-233, wherein [E] is present immediately subsequent to position 595, and replaces positions 596-598 (e.g., V5%, Q597, N598), numbered according to the amino acid sequence of SEQ ID NO: 138.
   235. The isolated AAV particle of any one of embodiments 176-234, wherein [E] corresponds to positions 603 to 605 of SEQ ID NO: 5, 8, or 3636.
   236. The isolated AAV particle of any one of embodiments 176-235, wherein [A][B][C][D][E] is present immediately subsequent to position 586, relative to a reference sequence numbered according to the amino acid sequence of SEQ ID NO: 5, 8, 138, or 3636.
   237. The isolated AAV particle of any one of embodiments 176-236, wherein [A][B][C][D][E] replaces positions 587-598 (e.g., A587, Q588, A589, Q590, A591, Q592, T593, G594, W595, V596, Q597, N598), numbered according to SEQ ID NO: 138.
   238. The isolated AAV particle of any one of embodiments 176-237, wherein [A][B][C][D][E] is present immediately subsequent to position 586 and replaces positions 587-598 (e.g., A587, Q588, A589, Q590, A591, Q592, T593, G594, W595, V5%, Q597, N598), numbered according to SEQ ID NO: 138.
   239. The isolated AAV particle of any one of embodiments 176-238, wherein [A][B][C][D][E] corresponds to positions 587-605 of SEQ ID NO: 5, 8, or 3636.
   240. The isolated AAV particle of any one of embodiments 137-239, wherein the AAV capsid variant comprises from N-terminus to C-terminus, [A][B].
   241. The isolated AAV particle of any one of embodiments 149-240, wherein the AAV capsid variant comprises from N-terminus to C-terminus, [A][B][C].
   242. The isolated AAV particle of any one of embodiments 165-241, wherein the AAV capsid variant comprises from N-terminus to C-terminus, [A][B][C][D].
   243. The isolated AAV particle of any one of embodiments 176-242, wherein the AAV capsid variant comprises from N-terminus to C-terminus, [A][B][C][D][E].
   244. An isolated, e.g., recombinant, AAV particle comprising an AAV capsid variant and a nucleic acid comprising a transgene encoding a β-glucocerebrosidase (GBA) protein, wherein the AAV capsid variant comprises PLNGAVHLY (SEQ ID NO: 3648) and optionally wherein the AAV capsid variant further comprises one, two, or all of an amino acid other than T at position 593 (e.g., A, L, R, V, C, I, K, M, N, P, Q, S), an amino acid other than G at position 594 (e.g., M, S, A, Q, V, T, L, P, H, K, N, I, Y, or R), and/or an amino acid other than W at position 595 (e.g., S, P, T, A, G, L, Q, H, N, R, K, V, E, F, M, C, or Y), relative to a reference sequence numbered according to the amino acid sequence of SEQ ID NO: 138.
   245. The isolated AAV particle of embodiment 244, wherein:
[0309] (i) the amino acid T, A, L, R, V, C, I, K, M, N, P, Q, or S is present at position 593, r numbered according to the amino acid sequence of SEQ ID NO: 138;
[0310] (ii) the amino acid G, M, S, A, Q, V, T, L, P, H, K, N, I, Y, or R is present at position 594, numbered according to the amino acid sequence of SEQ ID NO: 138; and/or
[0311] (iii) the amino acid W, S, P, T, A, G, L, Q, H, N, R, K, V, E, F, M, C, or Y is present at position 595, numbered according to the amino acid sequence of SEQ ID NO: 138.
   246. An isolated, e.g., recombinant, AAV particle comprising an AAV capsid variant and a nucleic acid comprising a transgene encoding a β-glucocerebrosidase (GBA) protein, wherein the AAV capsid variant comprises an amino sequence comprising the amino acid sequence of PLNGAVHLY (SEQ ID NO: 3648); and which further comprises one, two, three, or all of:
[0312] (i) the amino acid T, A, L, R, V, C, I, K, M, N, P, Q, or S at position 593 numbered according to SEQ ID NO: 138 or at position 600 numbered according to SEQ ID NO: 5, 8, or 3636;
[0313] (ii) the amino acid G, M, S, A, Q, V, T, L, P, H, K, N, I, Y, or R at position 594 numbered according to SEQ ID NO: 138 or at position 601 numbered according to SEQ ID NO: 5, 8, or 3636; and/or
[0314] (iii) the amino acid W, S, P, T, A, G, L, Q, H, N, R, K, V, E, F, M, C, or Y at position 595 numbered according to SEQ ID NO: 138 or at position 602 numbered according to SEQ ID NO: 5, 8, or 3636;
[0315] optionally, provided that the amino acids at positions 593-595, relative to a reference sequence numbered according to the amino acid sequence of SEQ ID NO: 138, does not comprise the amino acid sequence of TGW.
   247. The isolated AAV particle of any one of embodiments 244-246, wherein the AAV capsid variant comprises:
[0316] (i) the amino acid L at position 593 numbered according to SEQ ID NO: 138 or at position 600 numbered according to SEQ ID NO: 5, 8, or 3636;
[0317] (ii) the amino acid S at position 594 numbered according to SEQ ID NO: 138 or at position 601 numbered according to SEQ ID NO: 5, 8, or 3636; and/or
[0318] (iii) the amino acid P at position 595 numbered according to SEQ ID NO: 138 or at position 602 numbered according to SEQ ID NO: 5, 8, or 3636.
   248. The isolated AAV particle of any one of embodiments 244-247, wherein the AAV capsid variant comprises the amino acid sequence of SEQ ID NO: 138, comprise the amino acid sequence of TMS, ASP, LGS, LSS, RST, TAA, TAG, TAL, TAS, TGT, TMA, TQP, TSA, TSP, TST, TVA, TVS, VMS, VSP, VSS, VTP, TGP, VAS, AAA, AAP, AGP, AGW, ALP, AMS, AQP, ATG, ATP, ATQ, ATS, AVG, CSP, CTP, IAA, IAG, IAS, IGG, IGS, IGW, ILG, IPP, IQP, IQS, ISG, ISP, ISS, ITP, KGW, KSS, LAA, LAG, LAH, LAN, LAP, LAQ, LAR, LAS, LAT, LGP, LGQ, LGT, LHP, LKS, LLP, LMA, LMG, LMP, LMQ, LMS, LNP, LPP, LQP, LQQ, LQR, LSA, LSG, LSH, LSK, LSN, LSP, LSQ, LSR, LST, LTA, LTN, LTP, LTS, LVG, MAP, NAL, NAQ, NAS, NLP, NMQ, NQP, NSP, NTP, NTQ, NT, NVQ, PGW, QAP, QSP, RAA, RAG, RAQ, RAS, RGG, RGS, RGW, RIA, RIG, RIP, RLG, RLP, RLS, RLT, RML, RMS, RNS, RPG, RPP, RQG, RQL, RQP, RQQ, RQS, RSA, RSG, RSP, RSQ, RSS, RSV, RTA, RTG, RTL, RTP, RTQ, RTS, RU, RVE, RYS, SAA, SAF, SAG, SAK, SAL, SAM, SAN, SAP, SAQ, SAV, SGP, SLP, SMA, SMG, SMQ, SMS, SPP, SQL, SQM, SQP, SQQ, SSL, SSM, SSP, SSR, SSS, STP, STQ, STS, SVA, SVG, SVQ, SVS, TAK, TAM, TAN, TAP, TAQ, TAT, TAV, TAW, TGA, TGC, TGF, TGG, TGL, TGM, TGQ, TGR, TGS, TGV, TGY, TKA, TKP, TKQ, TKS, TLA, TLG, TLP, TLQ, TLR, TLS, TMG, TMK, TMM, TMN, TMP, TMQ, TMT, TNA, TNG, TNQ, TNS, TPA, TPG, TPP, TPQ, TPR, TPS, TPT, TPW, TQA, TQH, TQK, TQL, TQM, TQN, TQQ, TQR, TQT, TQW, TRW, TSG, TSH, TSK, TSL, TSM, TSN, TSQ, TSS, TSV, TSW, TrA, TTG, TK, TTP, TTQ, TTR, TTS, TIT, TVG, TVQ, TVW, TYA, TYS, VAA, VAG, VAK, VAN, VAQ, VAT, VGG, VGK, VGN, VGS, VHP, VKA, VKP, VKQ, VLG, VLP, VLS, VMA, VMP, VMQ, VNA, VNG, VNS, VPA, VPP, VPQ, VQA, VQG, VQN, VQP, VQQ, VQS, VQT, VRP, VSA, VSG, VSN, VSQ, VSR, VST, VTA, VTG, VTK, VTS, or VAP at positions 593-595 numbered according to SEQ ID NO: 138 or at positions 600-602 numbered according to SEQ ID NO: 5, 8, or 3636.
   249. The isolated AAV particle of any one of embodiments 244-248, wherein the AAV capsid variant comprises the amino acid sequence LSP at positions 593-595 numbered according to SEQ ID NO: 138 or at positions 600-602 numbered according to SEQ ID NO: 5, 8, or 3636.
   250. The isolated AAV particle of any one of embodiments 244-249, wherein the AAV capsid variant further comprises one, two, three, or all of an amino acid other than A at position 589 (e.g., D, S, or T), an amino acid other than Q at position 590 (e.g., K, H, L, P, or R), an amino acid other than A at position 591 (e.g., P or E), and/or an amino acid other than Q at position 592 (e.g., H, K, or P).
   251. The isolated AAV particle of embodiment 250, wherein:
[0319] (i) the amino acid A, D, S, or T at position 589, numbered according to SEQ ID NO: 138;
[0320] (ii) the amino acid Q, K, H, L, P, or R at position 590, numbered according to SEQ ID NO: 138;
[0321] (iii) the amino acid A, E, or P at position 591, numbered according to SEQ ID NO: 138; and/or
[0322] (iv) the amino acid Q, H, K, or P at position 592, numbered according to SEQ ID NO: 138.
   252. The isolated AAV particle of embodiment 250 or 251, wherein the AAV capsid variant comprises the amino acid sequence of:
[0323] (i) AHAQ (SEQ ID NO: 4742), AKAQ (SEQ ID NO: 4741), ALAQ (SEQ ID NO: 4749), APAQ (SEQ ID NO: 4745), AQAH (SEQ ID NO: 4747), AQAK (SEQ ID NO: 4746), AQAP (SEQ ID NO: 4743), AQAQ (SEQ ID NO: 4737), AQEQ (SEQ ID NO: 4748), AQPQ (SEQ ID NO: 4739), ARAQ (SEQ ID NO: 4750), DQAQ (SEQ ID NO: 4744), SQAQ (SEQ ID NO: 4738), or TQAQ (SEQ ID NO: 4751) at positions 589-592 numbered according to SEQ ID NO: 138 or at positions 596-599 numbered according to SEQ ID NO: 5, 8, or 3636; or
[0324] (ii) AKAQ (SEQ ID NO: 4741), AQAQ (SEQ ID NO: 4737), AQPQ (SEQ ID NO: 4739), DQAQ (SEQ ID NO: 4744), or SQAQ (SEQ ID NO: 4738) at positions 589-592 numbered according to SEQ ID NO: 138 or at positions 5%-599 numbered according to SEQ ID NO: 5, 8, or 3636.
   253. The isolated AAV particle of any one of embodiments 244-252, wherein the AAV capsid variant further comprises one, two, or all of an amino acid other than V at position 596 (e.g., G, F, D, L, A, I, or E), an amino acid other than Q at position 597 (e.g., K, R, H, E, L, or P), and/or an amino acid other than N at position 598 (e.g., H, K, T, I, S, D, P, or Y), relative to a reference sequence numbered according to the amino acid sequence of SEQ ID NO: 138.
   254. The isolated AAV particle of any one of embodiments 253, wherein:
[0325] (i) the amino acid V, G, F, D, L, A, I, or E at position 596 numbered according to SEQ ID NO: 138 or at position 603 numbered according to SEQ ID NO: 5, 8, or 3636;
[0326] (ii) the amino acid Q, K, R, H, E, L, or P at position 597, numbered according to SEQ ID NO: 138 or at position 604 numbered according to SEQ ID NO: 5, 8, or 3636; and/or
[0327] (iii) the amino acid N, H, K, T, I, S, D, P, or Y at position 598 numbered according to SEQ ID NO: 138 or at position 605 numbered according to SEQ ID NO: 5, 8, or 3636.
   255. An isolated, e.g., recombinant, AAV particle comprising an AAV capsid variant and a nucleic acid comprising a transgene encoding a β-glucocerebrosidase (GBA) protein, wherein the AAV capsid variant comprises PLNGAVHLY (SEQ ID NO: 3648), and optionally wherein the AAV capsid variant further comprises one, two, or all of an amino acid other than V at position 5% (e.g., G, F, D, L, A, I, or E), an amino acid other than Q at position 597 (e.g., K, R, H, E, L, or P), and/or an amino acid other than N at position 598 (e.g., H, K, T, I, S, D, P, or Y), numbered according to SEQ ID NO: 138.
   256. An isolated, e.g., recombinant, AAV particle comprising an AAV capsid variant and a nucleic acid comprising a transgene encoding a β-glucocerebrosidase (GBA) protein, wherein the AAV capsid variant comprises PLNGAVHLY (SEQ ID NO: 3648), and further comprising one, two, or all of:
[0328] (i) V, G, F, D, L, A, I, or E at position 596 numbered according to SEQ ID NO: 138 or at position 603 numbered according to SEQ ID NO: 5, 8, or 3636;
[0329] (ii) Q, K, R, H, E, L, or P at position 597 numbered according to SEQ ID NO: 138 or at position 604 numbered according to SEQ ID NO: 5, 8, or 3636; and/or
[0330] (iii) N, H, K, T, I, S, D, P, or Y at position 598 numbered according to SEQ ID NO: 138 or at position 605 numbered according to SEQ ID NO: 5, 8, or 3636;
[0331] optionally, provided that the amino acids at positions 596-598 numbered according to the amino acid sequence of SEQ ID NO: 138 or positions 603-605 of SEQ ID NO: 5, 8, or 3636, does not comprise the amino acid sequence of VQN.
   257. The isolated AAV particle of any one of embodiments 244-256, which comprises the amino acid P at position 597 numbered according to SEQ ID NO: 138 or at position 604 numbered according to SEQ ID NO: 5, 8, or 3636.
   258. The isolated AAV particle of any one of embodiments 244-257, which comprises the amino acid K at position 597 numbered according to SEQ ID NO: 138 or at position 604 numbered according to SEQ ID NO: 5, 8, or 3636.
   259. The isolated AAV particle of any one of embodiments 253-258, wherein the AAV capsid variant comprises the amino acid sequence of:
[0332] (i) GQN, VQH, VQK, VQT, VQN, FQN, VKN, VQI, DQN, LQN, VQS, VRN, AQN, IQN, VHN, VLN, VEN, VQD, DKN, EQN, FQK, GHN, GQT, VKK, VKT, VPH, VPN, VQP, or VQY at positions 596-598 numbered according to SEQ ID NO: 138 or positions 603-605 numbered according to SEQ ID NO: 5, 8, or 3636; or
[0333] (ii) VQN, VQT, VQK, DQN, VQH, FQN, AQN, VLN, LQN, VQI, VQS, EQN, GQT, VPN, VQD, VQP, VRN, or VKN at positions 596-598 numbered according to SEQ ID NO: 138 or positions 603-605 numbered according to SEQ ID NO: 5, 8, or 3636.
   260. The isolated AAV particle of any one of embodiments 253-259, which comprises the amino acid sequence of VKN, VPN, or VQN at positions 596-598 numbered according to SEQ ID NO: 138 or positions 603-605 numbered according to SEQ ID NO: 5, 8, or 3636.
   261. The isolated AAV particle of any one of embodiments 253-260, which comprises the amino acid sequence of VEN or VHN at positions 5%-598 numbered according to SEQ ID NO: 138 or positions 603-605 numbered according to SEQ ID NO: 5, 8, or 363.
   262. The isolated AAV particle of any one of embodiments 244-261, wherein the AAV capsid variant comprises:
[0334] (i) the amino acid sequence of any of SEQ ID NOs: 143, 148, 149, 151, 153-158, 160-163, 166, 168, 170, 171, 173-175, 177-179, 181, 182, 184-188, 191-197, 199-210, 212-215, 217-225, 227-231, 233, 234, 236-240, 243-262, 265, 267, 268, 270-277, 279, 282, 284, 285, 286, 288-293, 295, 296, 298, 300-314, 316-318, 320-327, 329, 331, 332, 334, 336-344, 346-350, 352-354, 356-367, 369, 371-380, 382-385, 387, 392-394, 396, 397, 399-401, 404-411, 413-415, 417, 419-429, 432, 433, 435-437, 438, 440-442, 444-447, 450-453, 456, 458-461, 464, 465, 467-469, 471-478, 480-483, 487-495, 497, 498, 500-503, 505, 507-512, 515-517, 522-525, 528-532, 534-539, 542-545, 547, 551-554, 558-561, 563-568, 570, 573, 574, 576, 579, 581, 582, 584, 586, 587, 592-596, 598, 601, 604-607, 610, 612, 614-619, 624-629, 631, 633-636, 640, 641, 645, 646, 649, 650, 658, 663, 664, 666, 668, 669, 672, 673, 675, 679, 683, 684, 686, 688, 689, 691, 693, 695, 697, 699, 700, 704, 705, 709-712, 720, 722, 726-731, 733, 736, 740, 745, 749, 750-752, 754, 755, 757, 758, 760-765, 767, 768, 771, 778, 780, 783-787, 792, 794, 797, 799-802, 804, 817, 818, 821, 824, 828, 831, 832, 834-837, 840-845, 847, 848, 851-853, 855, 858, 861, 862, 865, 869, 870-872, 874, 876, 882, 883, 887, 889, 890, 892-895, 897, 901, 903, 904, 905, 907, 910, 911, 913, 915, 919, 920, 923, 924, 926, 927, 929, 931-933, 935, 937, 940, 941, 943, 945-949, 953, 955, 957, 958, 960, 962, 964, 965, 971, 973, 974, 977, 986, 988, 989, 992, 994, 997, 998, 1000, 1004, 1007, 1013, 1015, 1017, 1018, 1020, 1025, 1027, 1029, 1030, 1031, 1033-1035, 1037-1039, 1043, 1046, 1049, 1052, 1056, 1057, 1059, 1062, 1065, 1067, 1068, 1070, 1073, 1075, 1077-1079, 1083-1087, 1089, 1090, 1094, 1100, 1101, 1103, 1106, 1107, 1110, 1111, 1112, 1114, 1115, 1117, 1119, 1125, 1126, 1129, 1132, or 1133;
[0335] (ii) an amino acid sequence comprising any portion of an amino acid sequence in (i), e.g., any 2, 3, 4, 5, 6, 7, 8, 9, 10, 11, 12, 13, 14, 15, 16, 17, or 18 amino acids, e.g., consecutive amino acids, thereof;
[0336] (iii) an amino acid sequence comprising at least one, two, or three but no more than four modifications, e.g., substitutions (e.g., conservative substitutions), insertions, or deletions, relative to any of the amino acid sequences in (i); or
[0337] (iv) an amino acid sequence comprising at least one, two, or three but no more than four different amino acids, relative to any one of the amino acid sequences in (i).
   263. The isolated AAV particle of any one of embodiments 244-262, wherein the AAV capsid variant comprises:
[0338] (i) the amino acid sequence of any of SEQ ID NOs: 143, 148-151, 153-158, 160-163, 166, 168, 170, 171, 173-175, 177-179, 181, 182, 184-188, 191-197, 199-210, 212-215, 217-225, 227-231, 233, 234, 236-240, 243-262, 265, 267, 268, 270-277, 279, 282, 284-286, 288-293, 295, 296, 298, 300-314, 316-318, 320-327, 329, 331, 332, 334, 336, 337-339, 340-344, 346-350, 352-354, 356-365, 367, 369, 371-380, 382-385, 387, 392-394, 396, 397, 399-401, 404-411, 413-415, 417, 419, 420-429, 432, 433, 435-438, 440-442, 444-447, 450-453, 456, 458, 459, 460, 461, 464, 465, 467-469, or 471-476;
[0339] (ii) an amino acid sequence comprising any portion of an amino acid sequence in (i), e.g., any 2, 3, 4, 5, 6, 7, 8, 9, 10, 11, 12, 13, 14, 15, 16, 17, or 18 amino acids, e.g., consecutive amino acids, thereof;
[0340] (iii) an amino acid sequence comprising at least one, two, or three but no more than four modifications, e.g., substitutions (e.g., conservative substitutions), insertions, or deletions, relative to any of the amino acid sequences in (i); or
[0341] (iv) an amino acid sequence comprising at least one, two, or three but no more than four different amino acids, relative to any one of the amino acid sequences in (i).
   264. The isolated AAV particle of any one of embodiments 244-263, wherein the amino acid sequence of PLNGAVHLY (SEQ ID NO: 3648) is present in loop VIII.
   265. The isolated AAV particle of any one of embodiments 244-264, wherein the amino acid sequence of PLNGAVHLY (SEQ ID NO: 3648) is present immediately subsequent to position 586, relative to a reference sequence numbered according to the amino acid sequence of SEQ ID NO: 138.
   266. The isolated AAV particle of any one of embodiments 244-265, wherein the amino acid sequence of PLNGAVHLY (SEQ ID NO: 3648) replaces positions 587 and 588 (e.g., A587 and Q588), numbered according to SEQ ID NO: 138.
   267. The isolated AAV particle of any one of embodiments 244-266, wherein the amino acid sequence of PLNGAVHLY (SEQ ID NO: 3648) is present immediately subsequent to position 586 and replaces positions 587 and 588 (e.g., A587 and Q588), numbered according to SEQ ID NO: 138.
   268. The isolated AAV particle of any one of embodiments 244-267, wherein the amino acid sequence of PLNGAVHLY (SEQ ID NO: 3648) corresponds to positions 587-595 of SEQ ID NO: 5, 8, or 3636.
   269. An isolated, e.g., recombinant, AAV particle comprising an AAV capsid variant and a nucleic acid comprising a transgene encoding a β-glucocerebrosidase (GBA) protein, wherein the AAV capsid variant comprises X1-X2-X3-X4-X5-X6-X7-X8-X9-X10-X11-X12-X13-X14-X15-X16-X17-X18-X19, wherein:
[0342] (i) X1 is: P, A, D, E, F, G, H, K, L, N, Q, R, S, T, or V;
[0343] (ii) X2 is: L, D, E, F, H, I, M, N, P, Q, R, S, or V;
[0344] (iii) X3 is: N, A, D, E, G, H, I, K, Q, S, T, V, or Y;
[0345] (iv) X4 is: G, A, C, D, E, P, Q, R, S, T, V, or W;
[0346] (v) X5 is: A, C, D, E, F, G, H, I, K, N, P, Q, R, S, T, V, W, or Y;
[0347] (vi) X6 is: V, A, C, D, E, F, G, H, I, K, L, M, N, Q, R, S, T, or Y;
[0348] (vii) X7 is: H, A, D, E, G, I, K, L, M, N, P, Q, R, S, T, V, or Y;
[0349] (viii) X8 is: L, A, D, E, F, G, H, I, K, M, N, P, Q, R, S, T, V, or Y;
[0350] (ix) X9 is: Y, A, C, D, E, F, G, H, I, K, L, M, N, Q, R, S, T, V, or W;
[0351] (x) X10 is: A, C, D, E, F, G, H, I, K, L, N, P, Q, R, S, T, V, or, Y;
[0352] (xi) X11 is: Q, A, D, E, H, K, L, P, R, or T;
[0353] (xii) X12 is: A, D, E, G, H, L, N, P, Q, R, S, T, or V;
[0354] (xiii) X13 is: Q, E, H, K, L, P, R, or T;
[0355] (xiv) X14 is: T, A, C, D, E, F, G, H, I, K, L, M, N, P, Q, R, S, V, W, or Y;
[0356] (xv) X15 is: G, A, C, D, E, F, H, I, K, L, M, N, P, Q, R, S, T, V, W, or Y;
[0357] (xvi) X16 is: W, A, C, D, E, F, G, H, I, K, L, M, N, P, Q, R, S, T, V, or Y;
[0358] (xvii) X17 is: V, A, D, E, F, G, H, I, or L;
[0359] (xviii) X18 is: Q, E, H, K, L, P, or R; and/or
[0360] (xix) X19 is: N, D, H, I, K, P, S, T, or Y.
   270. The isolated AAV particle of embodiment 269, wherein:
[0361] (i) X1 is: P, Q, A, S, T, R, H, L, or K;
[0362] (ii) X2 is: L, I, V, H, or R;
[0363] (iii) X3 is: N, D, K, Y, or I;
[0364] (iv) X4 is: G, S, R, C, or A;
[0365] (v) X5 is: A, S, G, N, T, D, Y, Q, V, or C;
[0366] (vi) X6 is: V, I, L, A, F, D, or G;
[0367] (vii) X7 is: H, N, Q, P, D, L, R, or Y;
[0368] (viii) X8 is: L, H, V, I, or R;
[0369] (ix) X9 is Y;
[0370] (x) X10 is: A, D, S, or T;
[0371] (xi) X11 is: Q, K, H, L, P, or R;
[0372] (xii) X12 is: A, P, E, or S;
[0373] (xiii) X13 is: Q, K, H, or P;
[0374] (xiv) X14 is: L, T, V, S, R, I, A, N, C, P, Q, M, or K;
[0375] (xv) X15 is: S, G, M, T, A, K, Q, V, I, R, N, P, L, H, Y;
[0376] (xvi) X16 is: P, W, S, K, Q, G, C, R, A, N, T, V, M, H, L, E, F, or Y;
[0377] (xvii) X17 is: V, D, F, A, E, L, G, or I;
[0378] (xviii) X18 is: Q, R, P, K, L, H, or E; and/or
[0379] (xix) X19 is: N, H, D, S, T, P, K, I, or Y.
   271. The isolated AAV particle of embodiment 269 or 270, wherein:
[0380] (i) X1 is: P, A, S, Q, or T;
[0381] (ii) X2 is L or I;
[0382] (iii) X3 is N or D;
[0383] (iv) X4 is G or S;
[0384] (v) X5 is: A, S, G, N, or T;
[0385] (vi) X6 is V;
[0386] (vii) X7 is H;
[0387] (viii) X8 is: L, H, V, or I
[0388] (ix) X9 is Y;
[0389] (x) X10 is: A, D, or S;
[0390] (xi) X11 is Q or K;
[0391] (xii) X12 is A or P;
[0392] (xiii) X13 is Q;
[0393] (xiv) X14 is: L, T, V, S, R, I, A, N, C, P, Q, or M;
[0394] (xv) X15 is: S, G, M, T, A, K, Q, V, I, R, N, P, L, or H;
[0395] (xvi) X16 is: P, W, S, K, Q, G, C, R, A, N, T, V, M, H, L, or E;
[0396] (xvii) X17 is: V, D, F, A, E, L, or G;
[0397] (xviii) X18 is: Q, R, P, K, or L; and/or
[0398] (xix) X19 is: N, H, D, S, T, P, K, or I.
   272. The isolated AAV particle of any one of embodiments 269-271, wherein X1-X2-X3-X4-X5-X6-X7-X8-X9-X10-X11-X12-X13-X14-X15-X16-X17-X18-X19 is present immediately subsequent to position 586, numbered according to SEQ ID NO: 5, 8, 138, or 3636.
   273. The isolated AAV particle of any one of embodiments 269-272, wherein X1-X2-X3-X4-X5-X6-X7-X8-X9-X10-X11-X12-X13-X14-X15-X16-X17-X18-X19 replaces positions 587-598 (e.g., A587, Q588, A589, Q590, A591, Q592, T593, G594, W595, V596, Q597, N598), numbered according to SEQ ID NO: 138.
   274. The isolated AAV particle of any one of embodiments 269-273, wherein X1-X2-X3-X4-X5-X6-X7-X8-X9-X10-X11-X12-X13-X14-X15-X16-X17-X18-X19 is present immediately subsequent to position 586 and replaces positions 587-598 (e.g., A587, Q588, A589, Q590, A591, Q592, T593, G594, W595, V596, Q597, N598), numbered according to SEQ ID NO: 138.
   275. The isolated AAV particle of any one of embodiments 269-274, wherein X1-X2-X3-X4-X5-X6-X7-X8-X9-X10-X11-X12-X13-X14-X15-X16-X17-X18-X19 corresponds to positions 587-605 of SEQ ID NO: 5, 8, or 3636.
   276. An isolated, e.g., recombinant, AAV particle comprising an AAV capsid variant and a nucleic acid comprising a transgene encoding a β-glucocerebrosidase (GBA) protein, wherein the AAV capsid variant comprises:
[0399] (a) the amino acid sequence of any one of SEQ ID NOs: 139-1138;
[0400] (b) an amino acid sequence comprising at least 3, 4, 5, 6, 7, 8, 9, 10, 11, 12, 13, 14, 15, 16, 17, or 18 consecutive amino acids from any one of SEQ ID NOs: 139-1138; or
[0401] (c) an amino acid sequence comprising at least one, two, or three but no more than four different amino acids, relative to the amino acid sequence of any one of SEQ ID NOs: 139-1138;
[0402] (d) an amino sequence comprising at least one, two, or three but no more than four modifications, e.g., substitutions (e.g., conservative substitutions), insertions, or deletions, relative to the amino acid sequence of any one of SEQ ID NOs: 139-1138;
[0403] optionally wherein the AAV capsid variant does not comprise the amino acid sequence of TGW at positions 593-595, relative to a reference sequence numbered according to the amino acid sequence of SEQ ID NO: 138.
   277. An isolated, e.g., recombinant, AAV particle comprising an AAV capsid variant and a nucleic acid comprising a transgene encoding a β-glucocerebrosidase (GBA) protein, wherein the AAV capsid variant comprises:
[0404] (a) the amino acid sequence of any one of SEQ ID NOs: 139-476;
[0405] (b) an amino acid sequence comprising at least 3, 4, 5, 6, 7, 8, 9, 10, 11, 12, 13, 14, 15, 16, 17, or 18 consecutive amino acids from any one of SEQ ID NOs: 139-476; or
[0406] (c) an amino acid sequence comprising at least one, two, or three but no more than four different amino acids, relative to the amino acid sequence of any one of SEQ ID NOs: 139-476;
[0407] (d) an amino sequence comprising at least one, two, or three but no more than four modifications, e.g., substitutions (e.g., conservative substitutions), insertions, or deletions, relative to the amino acid sequence of any one of SEQ ID NOs: 139-476;
[0408] optionally wherein the AAV capsid variant does not comprise the amino acid sequence of TGW at positions 593-595, relative to a reference sequence numbered according to the amino acid sequence of SEQ ID NO: 138.
   278. An isolated, e.g., recombinant, AAV particle comprising an AAV capsid variant and a nucleic acid comprising a transgene encoding a β-glucocerebrosidase (GBA) protein, or a fragment thereof, wherein the AAV capsid variant comprises:
[0409] (a) the amino acid sequence of any one of SEQ ID NOs: 140, 142-144, 148-150, 154-158, 160, 161, 163, 165, 166, 168, 170, 171, 173-175, 177-179, 181, 182, 184-197, 199-214, 218-222, 224, 225, 227-241, 243-253, 255-262, 265, 267, 268, 270, 271, 273, 274, 276, 277, 279, 282, 284-286, 288-296, 300-310, 312, 315, 317, 318, 320-323, 326, 327, 331, 332, 334, 336, 337, 339, 340, 341, 343, 344, 346, 349, 351, 352, 356-363, 365-367, 369, 370, 372-376, 378-381, 383-389, 392, 393, 395, 397-400, 404, 407, 408, 411, 412, 415, 417, 420-430, 432, 433, 435-438, 441, 442, 446-448, 451-453, 456, 458, 460, 461, 465, 467-469, 471-473, 475, 476, 478, 480, 482, 485, 488, 490, 492, 493, 495, 498, 500-503, 505, 507, 509, 510, 517, 522-526, 528, 535-538, 540, 543-545, 547, 551, 552, 557, 559, 561, 564, 568, 570, 572-574, 577, 585-588, 592-594, 596, 601, 602, 605, 612, 616, 619, 622, 624, 627, 628, 635, 640, 641, 646, 658, 660, 665, 666, 675, 678, 680, 683, 684, 689, 693, 695, 707, 711, 718, 719, 724, 727, 735, 740, 748, 751, 755, 758, 759, 765, 766, 768, 778, 783, 787, 791, 797, 801, 804, 817, 821, 832, 841, 852, 856, 861, 862, 864, 894, 906, 911, 913, 924, 929, 945, 959, 961, 970, 975, 980, 983, 988, 992, 1009, 1015, 1019, 1027, 1032, 1036, 1038, 1047, 1051, 1061, 1077, 1081, 1095, or 1113;
[0410] (b) an amino acid sequence comprising at least 3, 4, 5, 6, 7, 8, 9, 10, 11, 12, 13, 14, 15, 16, 17, or 18 consecutive amino acids from any one of the amino acid sequences in (i); or
[0411] (c) an amino acid sequence comprising at least one, two, or three but no more than four different amino acids, relative to the amino acid sequence of any one of the amino acid sequences in (i);
[0412] (d) an amino sequence comprising at least one, two, or three but no more than four modifications, e.g., substitutions (e.g., conservative substitutions), insertions, or deletions, relative to the amino acid sequence of any one of the amino acid sequences in (i);
[0413] optionally wherein the AAV capsid variant does not comprise the amino acid sequence of TGW at positions 593-595, relative to a reference sequence numbered according to the amino acid sequence of SEQ ID NO: 138.
   279. The isolated AAV particle of embodiment 276, wherein the AAV capsid variant comprises an amino acid sequence comprising at least 4, 5, 6, 7, 8, 9, 10, 11, 12, 13, 14, 15, 16, 17, or 18 consecutive amino acids from any one of SEQ ID NOs: 139-1138.
   280. The isolated AAV particle of any one of embodiments 276, 277, or 279, wherein the AAV capsid variant comprises an amino acid sequence comprising at least 4, 5, 6, 7, 8, 9, 10, 11, 12, 13, 14, 15, 16, 17, or 18 consecutive amino acids from SEQ ID NO: 314.
   281. The isolated AAV particle of any one of embodiments 276 or 279, wherein the AAV capsid variant comprises an amino acid sequence comprising at least 4, 5, 6, 7, 8, 9, 10, 11, 12, 13, 14, 15, 16, 17, or 18 consecutive amino acids from SEQ ID NO: 566.
   282. The isolated AAV particle of embodiment 276 or 277, comprising an amino acid sequence comprising at least 4, 5, 6, 7, 8, 9, 10, 11, 12, 13, 14, 15, 16, 17, or 18 consecutive amino acids from any one of SEQ ID NOs: 139-476.
   283. The isolated AAV particle of embodiment 276 or 278, wherein the AAV capsid variant comprises an amino acid sequence comprising at least 4, 5, 6, 7, 8, 9, 10, 11, 12, 13, 14, 15, 16, 17, or 18 consecutive amino acids from any one of SEQ ID NOs: 140, 142-144, 148-150, 154-158, 160, 161, 163, 165, 166, 168, 170, 171, 173-175, 177-179, 181, 182, 184-197, 199-214, 218-222, 224, 225, 227-241, 243-253, 255-262, 265, 267, 268, 270, 271, 273, 274, 276, 277, 279, 282, 284-286, 288-296, 300-310, 312, 315, 317, 318, 320-323, 326, 327, 331, 332, 334, 336, 337, 339, 340, 341, 343, 344, 346, 349, 351, 352, 356-363, 365-367, 369, 370, 372-376, 378-381, 383-389, 392, 393, 395, 397-400, 404, 407, 408, 411, 412, 415, 417, 420-430, 432, 433, 435-438, 441, 442, 446-448, 451-453, 456, 458, 460, 461, 465, 467-469, 471-473, 475, 476, 478, 480, 482, 485, 488, 490, 492, 493, 495, 498, 500-503, 505, 507, 509, 510, 517, 522-526, 528, 535-538, 540, 543-545, 547, 551, 552, 557, 559, 561, 564, 568, 570, 572-574, 577, 585-588, 592-594, 596, 601, 602, 605, 612, 616, 619, 622, 624, 627, 628, 635, 640, 641, 646, 658, 660, 665, 666, 675, 678, 680, 683, 684, 689, 693, 695, 707, 711, 718, 719, 724, 727, 735, 740, 748, 751, 755, 758, 759, 765, 766, 768, 778, 783, 787, 791, 797, 801, 804, 817, 821, 832, 841, 852, 856, 861, 862, 864, 894, 906, 911, 913, 924, 929, 945, 959, 961, 970, 975, 980, 983, 988, 992, 1009, 1015, 1019, 1027, 1032, 1036, 1038, 1047, 1051, 1061, 1077, 1081, 1095, 1113.
   284. The isolated AAV particle of embodiment 276, wherein the AAV capsid variant comprises an amino acid sequence comprising at least one, two, or three but no more than four different amino acids relative to the amino acid sequence of any one of SEQ ID NOs: 139-1138.
   285. The isolated AAV particle of embodiment 276 or 277, wherein the AAV capsid variant comprises an amino acid sequence comprising at least one, two, or three but no more than four different amino acids relative to the amino acid sequence of any one of SEQ ID NOs: 139-476.
   286. The isolated AAV particle of embodiment 276 or 278, wherein the AAV capsid variant comprises an amino acid sequence comprising at least one, two, or three but no more than four different amino acids relative to the amino acid sequence of any one of SEQ ID NOs: 140, 142-144, 148-150, 154-158, 160, 161, 163, 165, 166, 168, 170, 171, 173-175, 177-179, 181, 182, 184-197, 199-214, 218-222, 224, 225, 227-241, 243-253, 255-262, 265, 267, 268, 270, 271, 273, 274, 276, 277, 279, 282, 284-286, 288-296, 300-310, 312, 315, 317, 318, 320-323, 326, 327, 331, 332, 334, 336, 337, 339, 340, 341, 343, 344, 346, 349, 351, 352, 356-363, 365-367, 369, 370, 372-376, 378-381, 383-389, 392, 393, 395, 397-400, 404, 407, 408, 411, 412, 415, 417, 420-430, 432, 433, 435-438, 441, 442, 446-448, 451-453, 456, 458, 460, 461, 465, 467-469, 471-473, 475, 476, 478, 480, 482, 485, 488, 490, 492, 493, 495, 498, 500-503, 505, 507, 509, 510, 517, 522-526, 528, 535-538, 540, 543-545, 547, 551, 552, 557, 559, 561, 564, 568, 570, 572-574, 577, 585-588, 592-594, 596, 601, 602, 605, 612, 616, 619, 622, 624, 627, 628, 635, 640, 641, 646, 658, 660, 665, 666, 675, 678, 680, 683, 684, 689, 693, 695, 707, 711, 718, 719, 724, 727, 735, 740, 748, 751, 755, 758, 759, 765, 766, 768, 778, 783, 787, 791, 797, 801, 804, 817, 821, 832, 841, 852, 856, 861, 862, 864, 894, 906, 911, 913, 924, 929, 945, 959, 961, 970, 975, 980, 983, 988, 992, 1009, 1015, 1019, 1027, 1032, 1036, 1038, 1047, 1051, 1061, 1077, 1081, 1095, or 1113.
   287. The isolated AAV particle of embodiment 276, wherein the AAV capsid variant comprises an amino acid sequence comprising at least one, two, or three but no more than four modifications, e.g., substitutions (e.g., conservative substitutions), insertions, or deletions, relative to the amino acid sequence of SEQ ID NOs: 139-1138.
   288. The isolated AAV particle of embodiment 276 or 277, wherein the AAV capsid variant comprises an amino acid sequence comprising at least one, two, or three but no more than four modifications, e.g., substitutions (e.g., conservative substitutions), insertions, or deletions, relative to the amino acid sequence of SEQ ID NOs: 139-476.
   289. The isolated AAV particle of any one of embodiments 276, 277, 279, 280, 288, wherein the AAV capsid variant comprises:
[0414] (i) an amino acid sequence comprising at least one, two, or three but no more than four different amino acids relative to the amino acid sequence of SEQ ID NO: 314; or
[0415] (ii) an amino acid sequence comprising at least one, two, or three but no more than four modifications, e.g., substitutions (e.g., conservative substitutions), insertions, or deletions, relative to SEQ ID NO: 314.
   290. The isolated AAV particle of any one of embodiments 276, 279, 281, or 288, wherein the AAV capsid variant comprises:
[0416] (i) an amino acid sequence comprising at least one, two, or three but no more than four different amino acids relative to the amino acid sequence of SEQ ID NO: 566; or
[0417] (ii) an amino acid sequence comprising at least one, two, or three but no more than four modifications, e.g., substitutions (e.g., conservative substitutions), insertions, or deletions, relative to SEQ ID NO: 566.
   291. The isolated AAV particle of embodiment 276 or 278, wherein the AAV capsid variant comprises an amino acid sequence comprising at least one, two, or three but no more than four modifications, e.g., substitutions (e.g., conservative substitutions), insertions, or deletions, relative to any of SEQ ID NOs: 140, 142-144, 148-150, 154-158, 160, 161, 163, 165, 166, 168, 170, 171, 173-175, 177-179, 181, 182, 184-197, 199-214, 218-222, 224, 225, 227-241, 243-253, 255-262, 265, 267, 268, 270, 271, 273, 274, 276, 277, 279, 282, 284-286, 288-296, 300-310, 312, 315, 317, 318, 320-323, 326, 327, 331, 332, 334, 336, 337, 339, 340, 341, 343, 344, 346, 349, 351, 352, 356-363, 365-367, 369, 370, 372-376, 378-381, 383-389, 392, 393, 395, 397-400, 404, 407, 408, 411, 412, 415, 417, 420-430, 432, 433, 435-438, 441, 442, 446-448, 451-453, 456, 458, 460, 461, 465, 467-469, 471-473, 475, 476, 478, 480, 482, 485, 488, 490, 492, 493, 495, 498, 500-503, 505, 507, 509, 510, 517, 522-526, 528, 535-538, 540, 543-545, 547, 551, 552, 557, 559, 561, 564, 568, 570, 572-574, 577, 585-588, 592-594, 596, 601, 602, 605, 612, 616, 619, 622, 624, 627, 628, 635, 640, 641, 646, 658, 660, 665, 666, 675, 678, 680, 683, 684, 689, 693, 695, 707, 711, 718, 719, 724, 727, 735, 740, 748, 751, 755, 758, 759, 765, 766, 768, 778, 783, 787, 791, 797, 801, 804, 817, 821, 832, 841, 852, 856, 861, 862, 864, 894, 906, 911, 913, 924, 929, 945, 959, 961, 970, 975, 980, 983, 988, 992, 1009, 1015, 1019, 1027, 1032, 1036, 1038, 1047, 1051, 1061, 1077, 1081, 1095, or 1113.
   292. The isolated AAV particle of any one of embodiments 276-291, wherein 4, 5, 6, 7, 8, or 9 consecutive amino acids is not PLNG (SEQ ID NO: 3678), PLNGA (SEQ ID NO: 3679), PLNGAV (SEQ ID NO: 3680), PLNGAVHL (SEQ ID NO: 3682), and/or PLNGAVHLY (SEQ ID NO: 3648).
   293. The isolated AAV particle of any one of embodiments 276, 279, 284, or 287, wherein the AAV capsid variant comprises the amino acid sequence of any one of SEQ ID NOs: 139-1138.
   294. The isolated AAV particle of any one of embodiments 276, 279, 280, 284, or 287, wherein the AAV capsid variant comprises the amino acid sequence of SEQ ID NO: 314.
   295. The isolated AAV particle of any one of embodiments 276, 279, 281, 284, or 287, wherein the AAV capsid variant comprises the amino acid sequence of SEQ ID NO: 566.
   296. The isolated AAV particle of any one of embodiments 276, 277, 280, 282, 284, 285, 287, or 288, wherein the AAV capsid variant comprises the amino acid sequence of any one of SEQ ID NOs: 139-476.
   297. The isolated AAV particle of any one of embodiments 276, 277, 280, 283, 284, 286, 287, or 289, wherein the AAV capsid variant comprises the amino acid sequence of any one of SEQ ID NOs: 140, 142-144, 148-150, 154-158, 160, 161, 163, 165, 166, 168, 170, 171, 173-175, 177-179, 181, 182, 184-197, 199-214, 218-222, 224, 225, 227-241, 243-253, 255-262, 265, 267, 268, 270, 271, 273, 274, 276, 277, 279, 282, 284-286, 288-296, 300-310, 312, 315, 317, 318, 320-323, 326, 327, 331, 332, 334, 336, 337, 339, 340, 341, 343, 344, 346, 349, 351, 352, 356-363, 365-367, 369, 370, 372-376, 378-381, 383-389, 392, 393, 395, 397-400, 404, 407, 408, 411, 412, 415, 417, 420-430, 432, 433, 435-438, 441, 442, 446-448, 451-453, 456, 458, 460, 461, 465, 467-469, 471-473, 475, 476, 478, 480, 482, 485, 488, 490, 492, 493, 495, 498, 500-503, 505, 507, 509, 510, 517, 522-526, 528, 535-538, 540, 543-545, 547, 551, 552, 557, 559, 561, 564, 568, 570, 572-574, 577, 585-588, 592-594, 5%, 601, 602, 605, 612, 616, 619, 622, 624, 627, 628, 635, 640, 641, 646, 658, 660, 665, 666, 675, 678, 680, 683, 684, 689, 693, 695, 707, 711, 718, 719, 724, 727, 735, 740, 748, 751, 755, 758, 759, 765, 766, 768, 778, 783, 787, 791, 797, 801, 804, 817, 821, 832, 841, 852, 856, 861, 862, 864, 894, 906, 911, 913, 924, 929, 945, 959, %1, 970, 975, 980, 983, 988, 992, 1009, 1015, 1019, 1027, 1032, 1036, 1038, 1047, 1051, 1061, 1077, 1081, 1095, or 1113.
   298. The isolated AAV particle of any one of embodiments 1-297, wherein the AAV capsid variant comprises an amino acid sequence comprising at least 5, 6, 7, 8, or 9 consecutive amino acids from the amino acid sequence of PLNGAVHLY (SEQ ID NO: 3648), wherein:
[0418] (i) the 5 consecutive amino acids comprise PLNGA (SEQ ID NO: 3679);
[0419] (ii) the 6 consecutive amino acids comprise PLNGAV (SEQ ID NO: 3680);
[0420] (iii) the 7 consecutive amino acids comprise PLNGAVH (SEQ ID NO: 3681);
[0421] (iv) the 8 consecutive amino acids comprise PLNGAVHL (SEQ ID NO: 3682); or
[0422] (v) the 9 consecutive amino acids comprise PLNGAVHLY (SEQ ID NO: 3648),
[0423] wherein the AAV capsid variant comprises: (a) a VP1 protein comprising the amino acid sequence of SEQ ID NO: 138 or SEQ ID NO: 5, 8, or 3636; (b) a VP2 protein comprising the amino acid sequence of positions 138-736 of SEQ ID NO: 138 or positions 138-743 of SEQ ID NO: 5, 8, or 3636; (c) a VP3 protein comprising the amino acid sequence of positions 203-736 of SEQ ID NO: 138 or positions 203-743 of SEQ ID NO: 5, 8, or 3636; or (d) an amino acid sequence with at least 90% (e.g., at least about 95, 96, 97, 98, or 99%) sequence identity to any of the amino acid sequences in (a)-(c).
   299. The isolated AAV particle of any one of embodiments 1-298, wherein the AAV capsid variant comprises an amino acid sequence comprising at least 5, 6, 7, 8, or 9 consecutive amino acids from the amino acid sequence of PLNGAVHLY (SEQ ID NO: 3648), wherein:
[0424] (i) the 5 consecutive amino acids comprise PLNGA (SEQ ID NO: 3679);
[0425] (ii) the 6 consecutive amino acids comprise PLNGAV (SEQ ID NO: 3680);
[0426] (iii) the 7 consecutive amino acids comprise PLNGAVH (SEQ ID NO: 3681);
[0427] (iv) the 8 consecutive amino acids comprise PLNGAVHL (SEQ ID NO: 3682); or
[0428] (v) the 9 consecutive amino acids comprise PLNGAVHLY (SEQ ID NO: 3648),
[0429] wherein the AAV capsid variant comprises the amino acid sequence of any one of SEQ ID NOs: 5, 8, or 3636 or an amino acid sequence with at least 90% (e.g., at least about 95, 96, 97, 98, or 99%) sequence identity to any one of SEQ ID NOs: 5, 8, or 3636.
   300. The isolated AAV particle of any one of embodiments 1-299, wherein the AAV capsid variant comprises one or two, but no more than three different amino acids (e.g., substitutions, e.g., conservative substitutions) relative to the amino acid sequence of PLNGAVHLY (SEQ ID NO: 3648), wherein the AAV capsid variant comprises:
[0430] (a) a VP1 protein comprising the amino acid sequence of SEQ ID NO: 5, 8, 138, or 3636;
[0431] (b) a VP2 protein comprising the amino acid sequence of positions 138-736 of SEQ ID NO: 138 or positions 138-743 of SEQ ID NO: 5, 8, or 3636;
[0432] (c) a VP3 protein comprising the amino acid sequence of positions 203-736 of SEQ ID NO: 138 or positions 203-743 of SEQ ID NO: 5, 8, or 3636; or
[0433] (d) an amino acid sequence with at least 90% (e.g., at least about 95, 96, 97, 98, or 99%) sequence identity to any of the amino acid sequences in (a)-(c).
   301. The isolated AAV particle of any one of embodiments 1-300, wherein the AAV capsid variant comprises one or two, but no more than three different amino acids (e.g., substitutions, e.g., conservative substitutions) relative to the amino acid sequence of PLNGAVHLY (SEQ ID NO: 3648), wherein the AAV capsid variant comprises the amino acid sequence of any one of SEQ ID NOs: 5, 8, 138, or 3636 or an amino acid sequence with at least 90% (e.g., at least about 95, 96, 97, 98, or 99%) sequence identity to any one of SEQ ID NOs: 5, 8, 138, or 3636.
   302. The isolated AAV particle of any one of embodiments 298-302, wherein the amino acid sequence is present immediately subsequent to position 586, numbered according to any one of SEQ ID NO: 5, 8, 138, or 3636, optionally wherein the amino acid replaces positions 587 and 588 (e.g., A587 and Q588), numbered according to SEQ ID NO: 138.
   303. The isolated AAV particle of any one of embodiments 298-302, wherein the amino acid sequence corresponds to positions 587-595 of SEQ ID NO: 5, 8, or 3636.
   304. The isolated AAV particle of any one of embodiments 1-303, wherein the AAV capsid variant comprises one or two, but no more than three different amino acids (e.g., substitutions, e.g. conservative substitutions) relative to the amino acid sequence of PLNGAVHLYAQAQLSPVKN (SEQ ID NO: 566), wherein the AAV capsid variant comprises:
[0434] (a) a VP1 protein comprising the amino acid sequence of SEQ ID NO: 5, 8, 138, or 3636;
[0435] (b) a VP2 protein comprising the amino acid sequence of positions 138-736 of SEQ ID NO: 138 or positions 138-743 of SEQ ID NO: 5, 8, or 3636;
[0436] (c) a VP3 protein comprising the amino acid sequence of positions 203-736 of SEQ ID NO: 138 or positions 203-743 of SEQ ID NO: 5, 8, or 3636; or
[0437] (d) an amino acid sequence with at least 90% (e.g., at least about 95, 96, 97, 98, or 99%) sequence identity to any of the amino acid sequences in (a)-(c).
   305. The isolated AAV particle of any one of embodiments 1-304, wherein the AAV capsid variant comprises one or two, but no more than three different amino acids (e.g., substitutions, e.g., conservative substitutions) relative to the amino acid sequence of PLNGAVHLYAQAQLSPVKN (SEQ ID NO: 566), wherein the AAV capsid variant comprises the amino acid sequence of any one of SEQ ID NOs: 5, 8, 138, or 3636 or an amino acid sequence with at least 90% (e.g., at least about 95, 96, 97, 98, or 99%) sequence identity to any one of SEQ ID NOs: 5, 8, 138, or 3636.
   306. The isolated AAV particle of any one of embodiments 1-303, wherein the AAV capsid variant comprises one or two, but no more than three different amino acids (e.g., substitutions, e.g., conservative substitutions) relative to the amino acid sequence of PLNGAVHLYAQAQTGWVPN (SEQ ID NO: 314), wherein the AAV capsid variant comprises:
[0438] (a) a VP1 protein comprising the amino acid sequence of SEQ ID NO: 5, 8, 138, or 3636;
[0439] (b) a VP2 protein comprising the amino acid sequence of positions 138-736 of SEQ ID NO: 138 or positions 138-743 of SEQ ID NO: 5, 8, or 3636;
[0440] (c) a VP3 protein comprising the amino acid sequence of positions 203-736 of SEQ ID NO: 138 or positions 203-743 of SEQ ID NO: 5, 8, or 3636; or
[0441] (d) an amino acid sequence with at least 90% (e.g., at least about 95, 96, 97, 98, or 99%) sequence identity to any of the amino acid sequences in (a)-(c).
   307. The isolated AAV particle of any one of embodiments 1-303 or 306, wherein the AAV capsid variant comprises one or two, but no more than three different amino acids (e.g., substitutions, e.g., conservative substitutions) relative to the amino acid sequence of PLNGAVHLYAQAQTGWVPN (SEQ ID NO: 314), wherein the AAV capsid variant comprises the amino acid sequence of any one of SEQ ID NOs: 5, 8, 138, or 3636 or an amino acid sequence with at least 90% (e.g., at least about 95, 96, 97, 98, or 99%) sequence identity to any one of SEQ ID NOs: 5, 8, 138, or 3636.
   308. The isolated AAV particle of any one of embodiments 304-307, wherein the amino acid sequence is present immediately subsequent to position 586, numbered according to any one of SEQ ID NO: 5, 8, 138, or 3636, optionally wherein the amino acid replaces positions 587-598, numbered according to SEQ ID NO: 138.
   309. The isolated AAV particle of any one of embodiments 304-308, wherein the amino acid sequence corresponds to positions 587-605 of SEQ ID NO: 5 or 8.
   310. The isolated AAV particle of any one of the preceding embodiments, wherein the amino acid sequence is present in loop VIII.
   311. The isolated AAV particle of any one of embodiments 8-10, or 276-310, wherein the amino acid sequence is present immediately subsequent to position 586, 587, 588, 589, 590, 591, 592, 593, 594, or 595, relative to a reference sequence numbered according to the amino acid sequence of SEQ ID NO: 138.
   312. The isolated AAV particle of any one of embodiments 276-311, wherein the amino acid sequence is present immediately subsequent to position 586, relative to a reference sequence numbered according to the amino acid sequence of SEQ ID NO: 138.
   313. The isolated AAV particle of any one of embodiments 276-312, wherein the amino acid sequence replaces positions 587 and 588 (e.g., A587 and Q588), numbered according to SEQ ID NO: 138.
   314. The isolated AAV particle of any one of embodiments 276-311, wherein the amino acid sequence is present immediately subsequent to position 588, relative to a reference sequence numbered according to the amino acid sequence of SEQ ID NO: 138.
   315. The isolated AAV particle of any one of embodiments 276-311, wherein the amino acid sequence is present immediately subsequent to position 592, relative to a reference sequence numbered according to the amino acid sequence of SEQ ID NO: 138.
   316. The isolated AAV particle of any one of embodiments 276-311, wherein the amino acid sequence is present immediately subsequent to position 595, relative to a reference sequence numbered according to the amino acid sequence of SEQ ID NO: 138.
   317. The isolated AAV particle of any one of embodiments 276-316, wherein the AAV capsid variant further comprises:
[0442] (i) one, two, three, or all of an amino acid other than A at position 589, an amino acid other than Q at position 590, an amino acid other than A at position 591, and/or an amino acid other than Q at position 592, relative to a reference sequence numbered according to the amino acid sequence of SEQ ID NO: 138;
[0443] (ii) one, two, or all of an amino acid other than T at position 593, an amino acid other than G at position 594, and/or an amino acid other than W at position 595, relative to a reference sequence numbered according to the amino acid sequence of SEQ ID NO: 138
[0444] (iii) one, two, or all of an amino acid other than V at position 596, an amino acid other than Q at position 597, and/or an amino acid other than N at position 598, relative to a reference sequence numbered according to the amino acid sequence of SEQ ID NO: 138.
   318. The isolated AAV particle of any one of the preceding embodiments, wherein the AAV capsid variant further comprises an amino acid other than A at position 587 and an amino acid other than Q at position 588, numbered according to the amino acid sequence of SEQ ID NO: 138.
   319. The isolated AAV particle of any one of embodiments 276-318, wherein the AAV capsid variant comprises the amino acid P at position 587 the amino acid L at position 588, and the amino acid sequence NGAVHLY (SEQ ID NO: 3689), which is present immediately subsequent to position 588, corresponding to or numbered according to SEQ ID NO: 5, 8, 138, or 3636.
   320. An isolated, e.g., recombinant, AAV particle comprising an AAV capsid variant and a nucleic acid comprising a transgene encoding a β-glucocerebrosidase (GBA) protein, wherein the AAV capsid variant comprises the amino acid P at position 587 the amino acid L at position 588, and the amino acid sequence NGAVHLY (SEQ ID NO: 3689) present immediately subsequent to position 588, corresponding to or numbered according to SEQ ID NO: 5, 8, 138, or 3636.
   321. The isolated AAV particle of any one of embodiments 276-320, wherein the AAV capsid variant further comprises:
[0445] (i) one, two, or all of an amino acid other than T at position 593, an amino acid other than G at position 594, and/or an amino acid other than W at position 595, numbered according to the amino acid sequence of SEQ ID NO: 138; or
[0446] (ii) one, two, or all of an amino acid other than T at position 600, an amino acid other than G at position 601, and/or an amino acid other than W at position 602, numbered according to the amino acid sequence of SEQ ID NO: 5, 8, or 3636.
   322. The isolated AAV particle of any one of embodiments 276-321, wherein the AAV capsid variant further comprises:
[0447] (i) an amino acid other than T at position 593, an amino acid other than G at position 594, and an amino acid other than W at position 595, numbered according to the amino acid sequence of SEQ ID NO: 138; or
[0448] (ii) an amino acid other than T at position 600, an amino acid other than G at position 601, and an amino acid other than W at position 602, numbered according to the amino acid sequence of SEQ ID NO: 5, 8, 3636.
   323. The isolated AAV particle of any one of embodiments 276-322, wherein the AAV capsid variant further comprises:
[0449] (i) one, two, or all of the amino acid L at position 593, the amino acid S at position 594, and/or the amino acid P at position 595, numbered according to the amino acid sequence of SEQ ID NO: 138;
[0450] (ii) one, two, or all of the amino acid L at position 600, the amino acid S at position 601, and/or the amino acid P at position 602, numbered according to the amino acid sequence of SEQ ID NO: 5, 8, or 3636.
   324. The isolated AAV particle of any one of embodiments 276-323, wherein the AAV capsid variant further comprises:
[0451] (i) the amino acid L at position 593, the amino acid S at position 594, and the amino acid P at position 595, numbered according to the amino acid sequence of SEQ ID NO: 138; or
[0452] (ii) the amino acid L at position 600, the amino acid S at position 601, and the amino acid P at position 602, numbered according to the amino acid sequence of SEQ ID NO: 5, 8, or 3636.
   325. The isolated AAV particle of any one of embodiments 276-324, wherein the AAV capsid variant further comprises:
[0453] (i) one, two, or all of an amino acid other than V at position 5%, an amino acid other than Q at position 597, and/or an amino acid other than N at position 598, numbered according to the amino acid sequence of SEQ ID NO: 138;
[0454] (ii) one, two, or all of an amino acid other than V at position 603, an amino acid other than Q at position 604, and/or an amino acid other than N at position 605, numbered according to the amino acid sequence of SEQ ID NO: 5, 8, 3636.
   326. The isolated AAV particle of any one of embodiments 276-325, wherein the AAV capsid variant further comprises an amino acid other than Q at position 597 numbered according to the amino acid sequence of SEQ ID NO: 138 or at position 604 numbered according to SEQ ID NO: 5, 8, or 3636.
   327. The isolated AAV particle of any one of embodiments 276-326, wherein the AAV capsid variant further comprises the amino acid P at position 597 numbered according to the amino acid sequence of SEQ ID NO: 138 or at position 604 numbered according to SEQ ID NO: 5, 8, or 3636.
   328. The isolated AAV particle of any one of embodiments 276-326, wherein the AAV capsid variant further comprises the amino acid K at position 597 numbered according to the amino acid sequence of SEQ ID NO: 138 or at position 604 numbered according to SEQ ID NO: 5, 8, or 3636.
   329. The isolated AAV particle of any one of embodiments 276-326, wherein the AAV capsid variant further comprises the amino acid E or H at position 597 numbered according to the amino acid sequence of SEQ ID NO: 138 or at position 604 numbered according to SEQ ID NO: 5, 8, or 3636.
   330. The isolated AAV particle of any one of embodiments 267-326 or 328, wherein the AAV capsid variant further comprises the amino acid L at position 593, the amino acid S at position 594, the amino acid P at position 595, and the amino acid K at position 597, numbered according to the amino acid sequence of SEQ ID NO: 138.
   331. The isolated AAV particle of any one of embodiments 276-326, 328, or 330, wherein the AAV capsid variant further comprises the amino acid L at position 600, the amino acid S at position 601, the amino acid P at position 602, and the amino acid K at position 604, corresponding to or numbered according to the amino acid sequence of SEQ ID NO: 8 or 3636.
   332. The isolated AAV particle of any one of embodiments 276-326, 328, 330, or 331, wherein the AAV capsid variant comprises:
[0455] (i) the amino acid sequence of PLNGAVHLY (SEQ ID NO: 3648), optionally where the amino acid sequence is present immediately subsequent to position 586 and replaces positions 587 and 588 (e.g., A587 and Q 588), numbered according to SEQ ID NO: 138; and
[0456] (ii) the amino acid L at position 593, the amino acid S at position 594, the amino acid P at position 595, and the amino acid K at position 597, numbered according to the amino acid sequence of SEQ ID NO: 138.
   333. The isolated AAV particle of any one of embodiments 276-326, 328, or 330-332, wherein the AAV capsid variant comprises:
[0457] (i) the amino acid P at position 587, the amino acid L at position 588, and the amino acid sequence NGAVHLY (SEQ ID NO: 3689), which is present immediately subsequent to position 588, numbered according to SEQ ID NO: 138; and
[0458] (ii) the amino acid L at position 593, the amino acid S at position 594, the amino acid P at position 595, and the amino acid K at position 597, numbered according to the amino acid sequence of SEQ ID NO: 138.
   334. The isolated AAV particle of any one of embodiments 276-326, 328, or 330-333, wherein the AAV capsid variant comprises:
[0459] (i) the amino acid P at position 587, the amino acid L at position 588, and the amino acid sequence NGAVHLY (SEQ ID NO: 3689), which is present immediately subsequent to position 588, corresponding to or numbered according to SEQ ID NO: 8 or 3636; and
[0460] (ii) the amino acid L at position 600, the amino acid S at position 601, the amino acid P at position 602, and the amino acid K at position 604, corresponding to or numbered according to the amino acid sequence of SEQ ID NO: 8 or 3636.
   335. The isolated AAV particle of any one of embodiments 276-327, wherein the AAV capsid variant further comprises the amino acid P at position 597, numbered according to the amino acid sequence of SEQ ID NO: 138.
   336. The isolated AAV particle of any one of embodiments 276-327 or 335, wherein the AAV capsid variant further comprises the amino acid P at position 604, corresponding to or numbered according to the amino acid sequence of SEQ ID NO: 5 or 3636.
   337. The isolated AAV particle of any one of embodiments 276-327, 335, or 336, wherein the AAV capsid variant comprises:
[0461] (i) the amino acid sequence of PLNGAVHLY (SEQ ID NO: 3648), optionally where the amino acid sequence is present immediately subsequent to position 586 and replaces positions 587 and 588 (e.g., A587 and Q 588), numbered according to SEQ ID NO: 138; and
[0462] (ii) the amino acid P at position 597, numbered according to the amino acid sequence of SEQ ID NO: 138.
   338. The isolated AAV particle of any one of embodiments 276-327 or 335-337, wherein the AAV capsid variant comprises:
[0463] (i) the amino acid P at position 587, the amino acid L at position 588, and the amino acid sequence NGAVHLY (SEQ ID NO: 3689), which is present immediately subsequent to position 588, numbered according to SEQ ID NO: 138; and
[0464] (ii) the amino acid P at position 597, numbered according to the amino acid sequence of SEQ ID NO: 138.
   339. The isolated AAV particle of any one of embodiments 276-327 or 335-338, wherein the AAV capsid variant comprises:
[0465] (i) the amino acid P at position 587, the amino acid L at position 588, and the amino acid sequence NGAVHLY (SEQ ID NO: 3689), which is present immediately subsequent to position 588, corresponding to or numbered according to SEQ ID NO: 5 or 3636; and
[0466] (ii) the amino acid P at position 604, corresponding to or numbered according to the amino acid sequence of SEQ ID NO: 5 or 3636.
   340. An isolated, e.g., recombinant, AAV particle comprising an AAV capsid variant and a nucleic acid comprising a transgene encoding a β-glucocerebrosidase (GBA) protein, or a fragment thereof, wherein the AAV capsid variant comprises:
[0467] (i) the amino acid sequence of PLNGAVHLY (SEQ ID NO: 3648), optionally where the amino acid sequence is present immediately subsequent to position 586 and replaces positions 587 and 588 (e.g., A587 and Q 588), numbered according to SEQ ID NO: 138; and
[0468] (ii) the amino acid L at position 593, the amino acid S at position 594, the amino acid P at position 595, and the amino acid K at position 597, numbered according to the amino acid sequence of SEQ ID NO: 138.
   341. An isolated, e.g., recombinant, AAV particle comprising an AAV capsid variant and a nucleic acid comprising a transgene encoding a β-glucocerebrosidase (GBA) protein, or a fragment thereof, wherein the AAV capsid variant comprises:
[0469] (i) the amino acid P at position 587, the amino acid L at position 588, and the amino acid sequence NGAVHLY (SEQ ID NO: 3689), which is present immediately subsequent to position 588, numbered according to SEQ ID NO: 138; and
[0470] (ii) the amino acid L at position 593, the amino acid S at position 594, the amino acid P at position 595, and the amino acid K at position 597, numbered according to the amino acid sequence of SEQ ID NO: 138.
   342. An isolated, e.g., recombinant, AAV particle comprising an AAV capsid variant and a nucleic acid comprising a transgene encoding a β-glucocerebrosidase (GBA) protein, or a fragment thereof, wherein the AAV capsid variant comprises:
[0471] (i) the amino acid P at position 587, the amino acid L at position 588, and the amino acid sequence NGAVHLY (SEQ ID NO: 3689), which is present immediately subsequent to position 588, corresponding to or numbered according to SEQ ID NO: 8 or 3636; and
[0472] (ii) the amino acid L at position 600, the amino acid S at position 601, the amino acid P at position 602, and the amino acid K at position 604, corresponding to or numbered according to the amino acid sequence of SEQ ID NO: 8 or 3636.
   343. An isolated, e.g., recombinant, AAV particle comprising an AAV capsid variant and a nucleic acid comprising a transgene encoding a β-glucocerebrosidase (GBA) protein, or a fragment thereof, wherein the AAV capsid variant comprises:
[0473] (i) the amino acid sequence of PLNGAVHLY (SEQ ID NO: 3648), optionally where the amino acid sequence is present immediately subsequent to position 586 and replaces positions 587 and 588 (e.g., A587 and Q 588), numbered according to SEQ ID NO: 138; and
[0474] (ii) the amino acid P at position 597, numbered according to the amino acid sequence of SEQ ID NO: 138.
   344. An isolated, e.g., recombinant, AAV particle comprising an AAV capsid variant and a nucleic acid comprising a transgene encoding a β-glucocerebrosidase (GBA) protein, or a fragment thereof, wherein the AAV capsid variant comprises:
[0475] (i) the amino acid P at position 587, the amino acid L at position 588, and the amino acid sequence NGAVHLY (SEQ ID NO: 3689), which is present immediately subsequent to position 588, numbered according to SEQ ID NO: 138; and
[0476] (ii) the amino acid P at position 597, numbered according to the amino acid sequence of SEQ ID NO: 138.
   345. An isolated, e.g., recombinant, AAV particle comprising an AAV capsid variant and a nucleic acid comprising a transgene encoding a β-glucocerebrosidase (GBA) protein, or a fragment thereof, wherein the AAV capsid variant comprises:
[0477] (i) the amino acid P at position 587, the amino acid L at position 588, and the amino acid sequence NGAVHLY (SEQ ID NO: 3689), which is present immediately subsequent to position 588, corresponding to or numbered according to SEQ ID NO: 5 or 3636; and
[0478] (ii) the amino acid P at position 604, corresponding to or numbered according to the amino acid sequence of SEQ ID NO: 5 or 3636.
   346. The isolated AAV particle of any one of the preceding embodiments, wherein the AAV capsid variant further comprises:
[0479] (i) a modification, e.g., an insertion, substitution (e.g., conservative substitution), and/or deletion, in loop I, II, IV, and/or VI; and/or
[0480] (ii) a substitution at position K449, e.g., a K449R substitution, numbered according to SEQ ID NO: 138.
   347. The isolated AAV particle of any one of the preceding embodiments, wherein the AAV capsid variant comprises an amino acid sequence comprising at least one, two or three modifications, e.g., substitutions (e.g., conservative substitutions), but not more than 30, 20 or 10 modifications, e.g., substitutions (e.g., conservative substitutions), relative to the amino acid sequence of SEQ ID NO: 138.
   348. The isolated AAV particle of any one of the preceding embodiments, wherein the AAV capsid variant comprises an amino acid sequence comprising at least one, two or three, but no more than 30, 20 or 10 different amino acids relative to the amino acid sequence of SEQ ID NO: 138.
   349. The isolated AAV particle of any one of the preceding embodiments, wherein the AAV capsid variant comprises the amino acid sequence of SEQ ID NO: 138, or an amino acid sequence with at least 80% (e.g., at least about 85, 90, 95, 96, 97, 98, or 99%) sequence identity thereto.
   350. The isolated AAV particle of any one of the preceding embodiments, wherein the AAV capsid variant comprises the amino acid sequence of SEQ ID NO: 138.
   351. The isolated AAV particle of any one of the preceding embodiments, wherein the AAV capsid variant comprises an amino acid sequence encoded by the nucleotide sequence of SEQ ID NO: 137, or a sequence with at least 80% (e.g., at least about 85, 90, 95, 96, 97, 98, or 99%) sequence identity thereto.
   352. The isolated AAV particle of any one of the preceding embodiments, wherein the nucleotide sequence encoding the capsid variant comprises the nucleotide sequence of SEQ ID NO: 137, or a sequence with at least 80% (e.g., at least about 85, 90, 95, 96, 97, 98, or 99%) sequence identity thereto.
   353. The isolated AAV particle of any one of the preceding embodiments, wherein the AAV capsid variant comprises a VP1 protein, a VP2 protein, a VP3 protein, or a combination thereof.
   354. The isolated AAV particle of any one of embodiments 1-353, wherein the AAV capsid variant comprises the amino acid sequence corresponding to positions 138-743, e.g., a VP2, of SEQ ID NO: 5, 8, or 3636, or a sequence with at least 80% (e.g., at least about 85, 90, 95, 96, 97, 98, or 99%) sequence identity thereto.
   355. The isolated AAV particle of any one of embodiments 1-354, wherein the AAV capsid variant comprises the amino acid sequence corresponding to positions 203-743, e.g., a VP3, of SEQ ID NO: 5, 8, or 3636, or a sequence with at least 80% (e.g., at least about 85, 90, 95, 96, 97, 98, or 99%) sequence identity thereto.
   356. The isolated AAV particle of any one of embodiments 1-355, wherein the AAV capsid variant comprises the amino acid sequence corresponding to positions 138-736, e.g., a VP2, of SEQ ID NO: 138, or a sequence with at least 80% (e.g., at least about 85, 90, 95, 96, 97, 98, or 99%) sequence identity thereto.
   357. The isolated AAV particle of any one of embodiments 1-356, wherein the AAV capsid variant comprises the amino acid sequence corresponding to positions 203-736, e.g., a VP3, of SEQ ID NO: 138, or a sequence with at least 80% (e.g., at least about 85, 90, 95, 96, 97, 98, or 99%) sequence identity thereto.
   358. An isolated, e.g., recombinant, AAV particle comprising an AAV capsid variant and a nucleic acid comprising a transgene encoding a β-glucocerebrosidase (GBA) protein, or a fragment thereof, wherein the AAV capsid variant comprises the amino acid sequence of SEQ ID NO: 5.
   359. The isolated AAV particle of embodiment 358, wherein the nucleotide sequence encoding the AAV capsid variant comprises the nucleotide sequence of SEQ ID NO: 4.
   360. An isolated, e.g., recombinant, AAV particle comprising an AAV capsid variant and a nucleic acid comprising a transgene encoding a β-glucocerebrosidase (GBA) protein, or a fragment thereof, wherein the AAV capsid variant comprises the amino acid sequence of SEQ ID NO: 8.
   361. The isolated AAV particle of embodiment 360, wherein the nucleotide sequence encoding the AAV capsid variant comprises the nucleotide sequence of SEQ ID NO: 7.
   362. An isolated, e.g., recombinant, AAV particle comprising an AAV capsid variant and a nucleic acid comprising a transgene encoding a β-glucocerebrosidase (GBA) protein, or a fragment thereof, wherein the AAV capsid variant comprises the amino acid sequence of SEQ ID NO: 3636.
   363. The isolated AAV particle of embodiment 362, wherein the nucleotide sequence encoding the AAV capsid variant comprises the nucleotide sequence of SEQ ID NO: 3623.
   364. The isolated AAV particle of any one of the preceding embodiments, wherein the AAV capsid variant does not comprise:
[0481] (i) the amino acid sequence of TLAVPFK (SEQ ID NO: 1262) present immediately subsequent to position 588, numbered according to SEQ ID NO: 138;
[0482] (ii) an amino acid sequence present immediately subsequent to position 586 to 599, e.g., 586 to 594, 587 to 595, 588 to 596, 589 to 597, 590 to 598 numbered relative to SEQ ID NO: 138, having at least 5 consecutive amino acids corresponding to positions 586 to 594 numbered relative to SEQ ID NO: 138, of any the amino acid sequences provided in Table 1 of WO2020223276, the contents of which are hereby incorporated by reference in their entirety; or
[0483] (iii) an amino acid sequence present immediately subsequent to position 586 to 599, e.g., 586 to 594, 587 to 595, 588 to 596, 589 to 597, 590 to 598 numbered relative to SEQ ID NO: 138, having at least 5 consecutive amino acids corresponding to positions 586 to 594 numbered relative to SEQ ID NO: 138, of any SEQ ID NOs: 1, 12, 13, or 138.
   365. The isolated AAV particle of any one of the preceding embodiments, wherein the AAV capsid variant has an increased tropism for a CNS cell or tissue, e.g., a brain cell, brain tissue, spinal cord cell, or spinal cord tissue, relative to the tropism of a reference sequence comprising the amino acid sequence of SEQ ID NO: 138.
   366. The isolated AAV particle of any one of embodiments 20-365, wherein the AAV capsid variant has an increased tropism for a CNS cell or tissue, e.g., a brain cell, brain tissue, spinal cord cell, or spinal cord tissue, relative to the tropism of a reference sequence comprising the amino acid sequence of SEQ ID NO: 3636.
   367. The isolated AAV particle of any one of embodiments 20-366, wherein the AAV capsid variant is enriched at least about 1.1, 1.2, 1.3, 1.4, 1.5, 1.6, 1.7, 1.8, 1.9, 2, 2.5, 3, 3.5, 4, 4.5, 5, 5.5, or 6-fold, in the brain compared to a reference sequence of SEQ ID NO: 3636, e.g., when measured by an assay as described in Example 20.
   368. The isolated AAV particle of any one of embodiments 77, 80, 81, 276, 283, 286, 291, 292, 297, or 310-367, wherein the AAV capsid variant results in greater than 1, 2, 5, 10, 20, 30, 40, 50, or 100 reads per sample, e.g., when analyzed by an NGS sequencing assay, e.g., as described in Example 20.
   369. The isolated AAV particle of any one of embodiments 20-368, wherein the AAV capsid variant is enriched in the brain of at least two to three species, e.g., a non-human primate and rodent (e.g., mouse), e.g., as compared to a reference sequence of SEQ ID NO: 138.
   370. The isolated AAV particle of embodiment 369, wherein the at least two to three species are Macaca fascicularis, Chlorocebus sabaeus, Callithrix jacchus, and/or mouse (e.g., BALB/c mice).
   371. The isolated AAV particle of any one of the preceding embodiments, wherein the AAV capsid variant further comprises a modification, e.g., substitution (e.g., conservative substitution), insertion, or deletion, that results in one, two, three or all of: (1) reduced tropism in the liver; (2) de-targeted expression in the liver; (3) reduced activity in the liver, and/or (4) reduced binding to galactose.
   372. The isolated AAV particle of any one of the preceding embodiments, wherein the AAV capsid variant further comprises:
[0484] (i) a modification e.g., substitution (e.g., conservative substitution), insertion, or deletion, at position N470 (e.g., N470A), D271 (e.g., D271A), N272 (e.g., N297A), Y446 (e.g., Y446A), N498 (e.g., N498Y or N498I), W503 (e.g., W530R or W530A), L620 (e.g., L620F), or a combination thereof, relative to a reference sequence numbered according to SEQ ID NO: 138; or
[0485] (ii) one, two, three, four, five or all of an amino acid other than N at position 470 (e.g., A), an amino acid other than D at position 271 (e.g., A), an amino acid other than N at position 272 (e.g., A), an amino acid other than Y at position 446 (e.g., A), and amino acid other than N at position 498 (e.g., Y or I), and amino acid other than W at position 503 (e.g., R or A), and amino acid other than L at position 620 (e.g., F), relative to a reference sequence numbered according to SEQ ID NO: 138.
   373. An isolated, e.g., recombinant, nucleic acid comprising a transgene encoding a β-glucocerebrosidase (GBA) protein and an enhancement element, wherein the encoded enhancement element comprises:
[0486] (a) a Saposin C polypeptide or functional fragment or variant thereof, optionally comprising the amino acid sequence of SEQ ID NO: 1789 or 1758, or an amino acid sequence at least 85% (e.g., at least 90%, 92%, 95%, 97%, 98%, or 99%) identical thereto;
[0487] (b) a cell penetrating peptide, optionally comprising the amino acid sequence of any of SEQ ID NOs: 1794, 1796, or 1798, or an amino acid sequence having at least one, two, or three but no more than four modifications, e.g., substitutions (e.g., conservative substitutions), relative to SEQ ID NOs: 1794, 1796, or 1798; and/or
[0488] (c) a lysosomal targeting sequence, optionally comprising the amino acid sequence of any of SEQ ID NOs: 1800, 1802, 1804, 1806, or 1808, or an amino acid sequence having at least one, two, or three but no more than four modifications, e.g., substitutions (e.g., conservative substitutions), relative to SEQ ID NOs: 1800, 1802, 1804, 1806, or 1808.
   374. An isolated, e.g., recombinant viral genome comprising a nucleic acid comprising a transgene encoding a β-glucocerebrosidase (GBA) protein, and further comprising a nucleotide sequence encoding a miR binding site that modulates, e.g., reduces, expression of the encoded GBA protein in a cell or tissue of the DRG, liver, hematopoietic lineage, or a combination thereof.
   375. The viral genome of embodiment 373 or the AAV particle of any one of embodiments 6-372, wherein the nucleic acid further encodes an enhancement element.
   376. The isolated nucleic acid of embodiment 5 or 373, the viral genome of embodiment 375, or the AAV particle of embodiment 375, wherein the encoded enhancement element comprises a Saposin C polypeptide or functional fragment or variant thereof.
   377. The isolated nucleic acid of embodiment 5, 373 or 376, the viral genome of embodiment 375 or 376, or the AAV particle of embodiment 375 or 376, wherein:
[0489] (i) the encoded Saposin C polypeptide or functional fragment or variant thereof comprises the amino acid sequence of SEQ ID NO: 1789 or 1758, or an amino acid sequence at least sequence at least 85% (e.g., at least 90%, 92%, 95%, 97%, 98%, or 99%) identical thereto; and/or
[0490] (ii) the nucleotide sequence encoding the encoded Saposin C polypeptide or functional fragment or variant thereof comprises the nucleotide sequence of SEQ ID NO: 1787 or 1791, or a nucleotide sequence at least 85% (e.g., at least 90%, 92%, 95%, 97%, 98%, or 99%) identical thereto.
   378. The isolated nucleic acid of embodiment 5, the viral genome of embodiment 375, or the AAV particle of embodiment 375, wherein:
[0491] (i) the encoded enhancement element comprises the amino acid sequence of any of SEQ ID NOs: 1750, 1752, 1754, 1756-1758, 1784, or 1785, an amino acid sequence having at least one, two, or three but no more than four modifications, e.g., substitutions (e.g., conservative substitutions), relative to SEQ ID NO: 1750, 1752, 1754, 1756-1758, 1784, or 1785, or an amino acid sequence at least 85% (e.g., at least 90%, 92%, 95%, 97%, 98%, or 99%) identical thereto; and/or
[0492] (ii) the nucleotide sequence encoding the enhancement element comprises the nucleotide sequence of any one of SEQ ID NOs: 1751, 1753, 1755, 1858, or 1859, or a nucleotide sequence at least 85% (e.g., at least 90%, 92%, 95%, 97%, 98%, or 99%) identical thereto.
   379. The isolated nucleic acid of any one of embodiments 5, 373 or 376-378, the viral genome of embodiment 375-378, or the AAV particle of any one of embodiments 375-378, wherein the encoded enhancement element comprises a cell penetrating peptide.
   380. The isolated nucleic acid of embodiment 373 or 379, the viral genome of embodiment 379, or the AAV particle of embodiment 379, wherein:
[0493] (i) the cell penetrating peptide comprises the amino acid sequence of any of SEQ ID NOs: 1794, 1796, or 1798, or an amino acid sequence having at least one, two, or three but no more than four modifications, e.g., substitutions (e.g., conservative substitutions), relative to SEQ ID NOs: 1794, 1796, or 1798;
[0494] (ii) the nucleotide sequence encoding the cell penetrating peptide comprises the nucleotide sequence of any of SEQ ID NOs: 1793, 1795, or 1797, or a nucleotide sequence at least 80% (e.g., 85%, 90%, 92%, 95%, 96%, 97%, 98%, or 99%) identical thereto.
   381. The isolated nucleic acid of any one of embodiments 5, 373 or 376-380, the viral genome of any one of embodiments 375-380, or the AAV particle of any one of embodiments 375-380 wherein the encoded enhancement element comprises a lysosomal targeting sequence.
   382. The isolated nucleic of embodiment 373 or 381, the viral genome of embodiment 381, or the AAV particle of embodiment 381, wherein:
[0495] (i) the encoded lysosomal targeting sequence comprises the amino acid sequence of any of SEQ ID NOs: 1800, 1802, 1804, 1806, or 1808, or an amino acid sequence having at least one, two, or three but no more than four modifications, e.g., substitutions (e.g., conservative substitutions), relative to SEQ ID NOs: 1800, 1802, 1804, 1806, or 1808;
[0496] (ii) the nucleotide sequence encoding the lysosomal targeting sequence comprises the nucleotide sequence of any of SEQ ID NO: 1799, 1801, 1803, 1805, or 1807, or a nucleotide sequence having at least one, two, or three but no more than four modifications, e.g., substitutions (e.g., conservative substitutions), relative to SEQ ID NOs: 1799, 1801, 1803, 1805, or 1807.
   383. The isolated nucleic acid of any one of embodiments 5, 373 or 376-382, the viral genome of any one of embodiments 374-382, or the AAV particle of any one of embodiments 375-382, wherein the nucleic acid encodes at least 2, 3, 4 or more enhancement elements.
   384. The isolated nucleic acid of any one of embodiments 5, 373 or 376-383, the viral genome of any one of embodiments 374-383, or the AAV particle of any one of embodiments 375-383, wherein the nucleic acid encodes two enhancement elements, wherein:
[0497] (i) the first enhancement element comprises a lysosomal targeting sequence, optionally wherein the lysosomal targeting sequence comprises the amino acid sequence of SEQ ID NO: 1802, or an amino acid sequence having at least one, two, or three but no more than four modifications, e.g., substitutions (e.g., conservative substitutions), relative to SEQ ID NO: 1802; and
[0498] (ii) the second enhancement element comprises Saposin C polypeptide or functional fragment or variant thereof, optionally wherein the Saposin C polypeptide or functional fragment or variant thereof comprises the amino acid sequence of SEQ ID NO: 1789, or an amino acid sequence having at least one, two, or three but no more than four modifications, e.g., substitutions (e.g., conservative substitutions), relative to SEQ ID NO: 1789.
   385. The isolated nucleic acid, viral genome, or AAV particle of embodiment 384, wherein the nucleic acid encoding the first enhancement element and the second enhancement element, comprises the nucleotide sequences of 1801 and 1787, a nucleotide sequence at least 85% (e.g., at least 90%, 92%, 95%, 97%, 98%, or 99%) identical to SEQ ID NOs: 1801 and 1787, or a nucleotide sequence having at least one, two, or three but no more than four modifications, e.g., substitutions (e.g., conservative substitutions), relative to SEQ ID NOs: 1801 and 1787.
   386. The isolated nucleic acid of any one of embodiments 5, 373 or 376-385, the viral genome of any one of embodiments 374-385, or the AAV particle of any one of embodiments 375-385, wherein the nucleic acid encodes a first enhancement element and a second enhancement element, wherein:
[0499] (i) the first enhancement element a cell penetrating peptide, optionally wherein the cell penetrating peptide comprises the amino acid sequence of SEQ ID NO: 1798, or an amino acid sequence having at least one, two, or three but no more than four modifications, e.g., substitutions (e.g., conservative substitutions), relative to SEQ ID NO: 1798; and
[0500] (ii) the second enhancement element comprises a lysosomal targeting sequence, optionally wherein the lysosomal targeting sequence comprises the amino acid sequence of SEQ ID NO: 1802, or an amino acid sequence having at least one, two, or three but no more than four modifications, e.g., substitutions (e.g., conservative substitutions), relative to SEQ ID NO: 1802.
   387. The isolated nucleic acid, viral genome, or AAV particle of embodiment 386, wherein the nucleic acid encoding the first enhancement element and the second enhancement element, comprises the nucleotide sequences of 1797 and 1801, a nucleotide sequence at least 85% (e.g., at least 90%, 92%, 95%, 97%, 98%, or 99%) identical to SEQ ID NOs: 1797 and 1801, or a nucleotide sequence having at least one, two, or three but no more than four modifications, e.g., substitutions (e.g., conservative substitutions), relative to SEQ ID NOs: 1797 and 1801.
   388. The isolated nucleic acid of any one of embodiments 5, 373 or 376-387, the viral genome of any one of embodiments 375-387, or the AAV particle of any one of embodiments 374-387, wherein the nucleic acid encodes a first enhancement element, a second enhancement element and a third enhancement element, wherein:
[0501] (i) the first enhancement element comprises a lysosomal targeting sequence, optionally wherein the lysosomal targeting sequence comprises the amino acid sequence of SEQ ID NO: 1802, or an amino acid sequence having at least one, two, or three but no more than four modifications, e.g., substitutions (e.g., conservative substitutions), relative to SEQ ID NO: 1802;
[0502] (ii) the second enhancement element comprises a cell penetrating peptide, optionally wherein the cell penetrating peptide comprises the amino acid sequence of SEQ ID NO: 1798, or an amino acid sequence having at least one, two, or three but no more than four modifications, e.g., substitutions (e.g., conservative substitutions), relative to SEQ ID NO: 1798; and
[0503] (iii) the third enhancement element comprises Saposin C polypeptide or functional fragment or variant thereof, optionally wherein the Saposin C polypeptide or functional fragment or variant thereof comprises amino acid sequence of SEQ ID NO: 1789, or an amino acid sequence having at least one, two, or three but no more than four modifications, e.g., substitutions (e.g., conservative substitutions), relative to SEQ ID NO: 1789.
   389. The isolated nucleic acid, viral genome, or AAV particle of embodiment 388, wherein the nucleic acid encoding the first enhancement element, the second enhancement element, and the third enhancement element, comprises the nucleotide sequences of 1801, 1797, and 1787, a nucleotide sequence at least 85% (e.g., at least 90%, 92%, 95%, 97%, 98%, or 99%) identical to SEQ ID NOs: 1801, 1797, and 1787, or a nucleotide sequence having at least one, two, or three but no more than four modifications, e.g., substitutions (e.g., conservative substitutions), relative to SEQ ID NOs: 1801, 1797, and 1787.
   390. The isolated nucleic acid of any one of embodiments 1-5, 373 or 376-389, the viral genome of any one of embodiments 374-389, or the AAV particle of any one of embodiments 375-389, wherein the nucleic acid further encodes a linker.
   391. The isolated nucleic acid of any one of embodiments 5, 373 or 376-389, the viral genome of any one of embodiments 375-389, or the AAV particle of any one of embodiments 375-389, wherein the encoded enhancement element and the encoded GBA protein are connected directly, e.g., without a linker.
   392. The isolated nucleic acid of any one of embodiments 5, 373 or 376-390, the viral genome of any one of embodiments 375-390, or the AAV particle of any one of embodiments 375-390, wherein the encoded enhancement element and the encoded GBA protein are connected via the encoded linker.
   393. The isolated nucleic acid, viral genome, or AAV particle of embodiment 390 or 392, wherein:
[0504] (i) the encoded linker comprises the amino acid sequence of any of SEQ ID NOs: 1854, 1855, 1843, or 1845, or an amino acid sequence having at least one, two, or three but no more than four modifications, e.g., substitutions (e.g., conservative substitutions), relative to SEQ ID NOs: 1854, 1855, 1843, or 1845;
[0505] (ii) the nucleotide sequence encoding the linker comprises any of the nucleotide sequences of Table 2, or a nucleotide sequence having at least one, two, or three but no more than four modifications, e.g., substitutions (e.g., conservative substitutions), relative to the sequences of Table 2;
[0506] (iii) the nucleotide sequence encoding the linker comprises the nucleotide sequence of any one of SEQ ID NOs: 1724, 1726, 1729, or 1730, or a nucleotide sequence having at least one, two, or three but no more than four modifications, e.g., substitutions (e.g., conservative substitutions), relative to SEQ ID NOs: 1724, 1726, 1729, or 1730;
[0507] (iv) the encoded linker comprises a furin cleavage site;
[0508] (v) the encoded linker comprises a T2A polypeptide;
[0509] (vi) the encoded linker comprises a (Gly4Ser)n linker (SEQ ID NO: 1871), wherein n is 1-10, e.g., n is 3, 4, or 5; and/or
[0510] (vii) the encoded linker comprises a (Gly4Ser)3 linker (SEQ ID NO: 1845).
   394. The isolated nucleic acid, the viral genome, or AAV particle of any one of embodiments 390 or 392-393, wherein:
[0511] (i) the encoded linker comprises the amino acid sequence of SEQ ID NO: 1854 and/or the amino acid sequence of SEQ ID NO: 1855, or an amino acid sequence having at least one, two, or three but no more than four modifications, e.g., substitutions, relative to SEQ ID NO: 1854 and/or 1855; and/or
[0512] (ii) the nucleotide sequence encoding the linker comprises the nucleotide sequence of SEQ ID NO: 1724 and/or the nucleotide sequence of SEQ ID NO: 1726, or a nucleotide sequence having at least one, two, or three but no more than four modifications, e.g., substitutions, relative to SEQ ID NO: 1724 and/or 1726.
   395. The isolated nucleic acid of any one of embodiments 390 or 392-394, the viral genome of any one of embodiments 390 or 392-394, or the AAV particle of any one of embodiments 390 or 392-394, wherein:
[0513] (i) the encoded linker comprises the amino acid sequence of SEQ ID NO: 1845, or an amino acid sequence having at least one, two, or three but no more than four modifications, e.g., substitutions, relative to SEQ ID NO: 1845;
[0514] (ii) the nucleotide sequence encoding the linker comprises the nucleotide sequence of SEQ ID NO: 1730, or a nucleotide sequence having at least one, two, or three but no more than four modifications, e.g., substitutions, relative to SEQ ID NO: 1730.
   396. The isolated nucleic acid of any one of embodiments 5, 373 or 376-395, the viral genome of any one of embodiments 375-395, or the AAV particle of any one of embodiments 375-395, wherein the encoded GBA protein and the encoded enhancement element are expressed as a single polypeptide.
   397. The isolated nucleic acid, the viral genome, or the AAV particle of embodiment 396, wherein the single polypeptide comprises a cleavage site present between the encoded GBA protein and the encoded enhancement element, optionally wherein the cleavage site is an T2A and/or a furin cleavage site.
   398. The isolated nucleic acid of any one of embodiments 5, 373 or 376-397, the viral genome of any one of embodiments 375-397, or the AAV particle of any one of embodiments 375-397, wherein:
[0515] (i) the nucleotide sequence encoding the enhancement element is located 5′ relative to the nucleotide sequence encoding the GBA protein; and/or
[0516] (ii) the nucleotide sequence encoding the enhancement element is located 3′ relative to the nucleotide sequence encoding the GBA protein.
   399. The isolated nucleic acid of any one of embodiments 1-5, 373 or 376-398, the viral genome of any one of embodiments 374-398, or the viral genome of any one of embodiments 375-398, wherein the encoded GBA protein comprises the amino acid sequence of SEQ ID NO: 1775, or an amino acid sequence at least 70% (e.g., at least 75%, 80%, 85%, 90%, 92%, 95%, 97%, 98%, or 99%) identical thereto.
   400. The isolated nucleic acid of any one of embodiments 373 or 376-399, the viral genome of any one of embodiments 374-399, or the AAV particle of any one of embodiments 375-399, wherein the nucleotide sequence encoding the GBA protein comprises the nucleotide sequence of any one of SEQ ID NOs: 1773, 1777, or 1781, or a nucleotide sequence at least 70% (e.g., at least 75%, 80%, 85%, 90%, 92%, 95%, 97%, 98%, or 99%) identical thereto.
   401. The isolated nucleic acid of any one of embodiments 1-5, 373, or 376-400, the viral genome of any one of embodiments 374-400, or the AAV particle of any one of embodiments 375-400, wherein the nucleotide sequence encoding the GBA protein comprises the nucleotide sequence of SEQ ID NO: 1773.
   402. The isolated nucleic acid of any one of embodiments 373 or 376-400, the viral genome of any one of embodiments 374-400, or the AAV particle of any one of embodiments 375-400, wherein the nucleotide sequence encoding the GBA protein comprises the nucleotide sequence of SEQ ID NO: 1777.
   403. The isolated nucleic acid of any one of embodiments 373 or 376-400, the viral genome of any one of embodiments 374-400, or the AAV particle of any one of embodiments 375-400, wherein the nucleotide sequence encoding the GBA protein comprises the nucleotide sequence of SEQ ID NO: 1781.
   404. The isolated nucleic acid of any one of embodiments 1-5, 373, or 376-403, the viral genome of any one of embodiments 374-403, or the AAV particle of any one of embodiments 375-403, wherein the nucleotide sequence encoding the GBA protein is codon optimized.
   405. The isolated nucleic acid of any one of embodiments 1-5, 373, or 376-404, the viral genome of any one of embodiments 374-404, or the AAV particle of any one of embodiments 375-404, wherein the nucleic acid further encodes a signal sequence.
   406. The isolated nucleic acid the viral genome, or AAV particle of embodiment 405, wherein the encoded signal sequence comprises the amino acid sequence of SEQ ID NO: 1853, or an amino acid sequence at least 85% (e.g., at least 90%, 92%, 95%, 97%, 98%, or 99%) identical thereto.
   407. The isolated nucleic acid, the viral genome, or AAV particle of embodiment 405 or 406, wherein the encoded signal sequence comprises the amino acid sequence of SEQ ID NO: 1857, or an amino acid sequence at least 85% (e.g., at least 90%, 92%, 95%, 97%, 98%, or 99%) identical thereto.
   408. The isolated nucleic acid, the viral genome, or AAV particle of any one of embodiments 405-407, wherein the nucleotide sequence encoding the signal sequence comprises the nucleotide sequence of any of SEQ ID NOs: 1850-1852 or 1856, or a nucleotide sequence at least 85% (e.g., at least 90%, 92%, 95%, 97%, 98%, or 99%) identical thereto.
   409. The isolated nucleic acid, the viral genome, or AAV particle of any one of embodiments 405-408, wherein the nucleotide sequence encoding the signal sequence is located:
[0517] (i) 5′ relative to the nucleotide sequence encoding the GBA protein; and/or
[0518] (ii) 5′ relative to the encoded enhancement element.
   410. The isolated nucleic acid, the viral genome, or AAV particle of any one of embodiments 405-409, wherein:
[0519] (i) the nucleotide sequence encoding the signal sequence comprises the nucleotide sequence of 1850 or a nucleotide sequence at least 85% (e.g., at least 90%, 92%, 95%, 97%, 98%, or 99%) identical thereto, and the nucleotide sequence encoding the GBA protein comprises the nucleotide sequence of SEQ ID NO: 1773, or a nucleotide sequence at least 70% (e.g., at least 75%, 80%, 85%, 90%, 92%, 95%, 97%, 98%, or 99%) identical thereto;
[0520] (ii) the nucleotide sequence encoding the signal sequence comprises the nucleotide sequence of 1851 or a nucleotide sequence at least 85% (e.g., at least 90%, 92%, 95%, 97%, 98%, or 99%) identical thereto, and the nucleotide sequence encoding the GBA protein comprises the nucleotide sequence of SEQ ID NO: 1777, or a nucleotide sequence at least 70% (e.g., at least 75%, 80%, 85%, 90%, 92%, 95%, 97%, 98%, or 99%) identical thereto;
[0521] (iii) the nucleotide sequence encoding the signal sequence comprises the nucleotide sequence of 1852 or a nucleotide sequence at least 85% (e.g., at least 90%, 92%, 95%, 97%, 98%, or 99%) identical thereto, and the nucleotide sequence encoding the GBA protein comprises the nucleotide sequence of SEQ ID NO: 1781, or a nucleotide sequence at least 70% (e.g., at least 75%, 80%, 85%, 90%, 92%, 95%, 97%, 98%, or 99%) identical thereto;
[0522] and optionally wherein the nucleotide sequence encoding the signal sequence is located 5′ relative to the nucleotide sequence encoding the GBA protein.
   411. The isolated nucleic acid, the viral genome, or AAV particle of any one of embodiments 405-410, wherein the encoded signal sequence comprises the amino acid sequence of SEQ ID NO: 1853 or an amino acid sequence at least 85% (e.g., at least 90%, 92%, 95%, 97%, 98%, or 99%) identical thereto; and the encoded GBA protein comprises the amino acid sequence of SEQ ID NO: 1775, or an amino acid sequence at least 70% (e.g., at least 75%, 80%, 85%, 90%, 92%, 95%, 97%, 98%, or 99%) identical thereto;
[0523] and optionally wherein the encoded signal sequence is located N-terminal relative to the encoded GBA protein.
   412. The isolated nucleic acid, the viral genome, or AAV particle of any one of embodiments 405-411, wherein:
[0524] (i) the nucleotide sequence encoding the signal sequence comprises the nucleotide sequence of any of SEQ ID NO: 1850-1852, or a nucleotide sequence at least 85% (e.g., at least 90%, 92%, 95%, 97%, 98%, or 99%) identical thereto; and the nucleotide sequence encoding the enhancement element comprises the nucleotide sequence of SEQ ID NO: 1801, or a nucleotide sequence at least 85% (e.g., at least 90%, 92%, 95%, 97%, 98%, or 99%) identical thereto; and optionally wherein the nucleotide sequence encoding the signal sequence is located 5′ relative to the nucleotide sequence encoding the enhancement element;
[0525] (ii) the encoded signal sequence comprises the amino acid sequence of SEQ ID NO: 1853, or an amino acid sequence at least 85% (e.g., at least 90%, 92%, 95%, 97%, 98%, or 99%) identical thereto; and the encoded enhancement element comprises the amino acid sequence of SEQ ID NO: 1802, or an amino acid sequence having at least one, two, or three but no more than four modifications, e.g., substitutions, relative to SEQ ID NO: 1802; and optionally wherein the encoded signal sequence is located N-terminal relative to the encoded enhancement element;
[0526] (iii) the nucleotide sequence encoding the signal sequence comprises the nucleotide sequence of SEQ ID NO: 1856, or a nucleotide sequence at least 85% (e.g., at least 90%, 92%, 95%, 97%, 98%, or 99%) identical thereto; and the nucleotide sequence encoding the enhancement element comprises the nucleotide sequence of SEQ ID NO: 1859, or a nucleotide sequence at least 85% (e.g., at least 90%, 92%, 95%, 97%, 98%, or 99%) identical thereto; and the nucleotide sequence encoding the enhancement element comprises the nucleotide sequence of SEQ ID NO: 1859; and optionally wherein the nucleotide sequence encoding the signal sequence is located 5′ relative to the nucleotide sequence encoding the enhancement element;
[0527] (iv) the encoded signal sequence comprises the amino acid sequence of SEQ ID NO: 1857, or an amino acid sequence at least 85% (e.g., at least 90%, 92%, 95%, 97%, 98%, or 99%) identical thereto; and the encoded enhancement element comprises the amino acid sequence of SEQ ID NO: 1785, or an amino acid sequence at least 85% (e.g., at least 90%, 92%, 95%, 97%, 98%, or 99%) identical thereto; and optionally wherein the encoded signal sequence is located N-terminal relative to the encoded enhancement element;
[0528] (v) the nucleotide sequence encoding the signal sequence comprises the nucleotide sequence of SEQ ID NO: 1856, or a nucleotide sequence at least 85% (e.g., at least 90%, 92%, 95%, 97%, 98%, or 99%) identical thereto; and the nucleotide sequence encoding the enhancement element comprises the nucleotide sequence of SEQ ID NO: 1787, or a nucleotide sequence at least 85% (e.g., at least 90%, 92%, 95%, 97%, 98%, or 99%) identical thereto; and the nucleotide sequence encoding the enhancement element comprises the nucleotide sequence of SEQ ID NO: 1787; and optionally wherein the nucleotide sequence encoding the signal sequence is located 5′ relative to the nucleotide sequence encoding the enhancement element;
[0529] (vi) the encoded signal sequence comprises the amino acid sequence of SEQ ID NO: 1857, or an amino acid sequence at least 85% (e.g., at least 90%, 92%, 95%, 97%, 98%, or 99%) identical thereto; and the encoded enhancement element comprises the amino acid sequence of SEQ ID NO: 1789, or an amino acid sequence having at least one, two, or three but no more than four modifications, e.g., substitutions, relative to SEQ ID NO: 1789; and optionally wherein the encoded signal sequence is located N-terminal relative to the encoded enhancement element;
[0530] (vii) the nucleotide sequence encoding the signal sequence comprises the nucleotide sequence of SEQ ID NO: 1856, or a nucleotide sequence at least 85% (e.g., at least 90%, 92%, 95%, 97%, 98%, or 99%) identical thereto; and the nucleotide sequence encoding the enhancement element comprises the nucleotide sequence of SEQ ID NO: 1791, or a nucleotide sequence at least 85% (e.g., at least 90%, 92%, 95%, 97%, 98%, or 99%) identical thereto; and the nucleotide sequence encoding the enhancement element comprises the nucleotide sequence of SEQ ID NO: 1791 and optionally wherein the nucleotide sequence encoding the signal sequence is located 5′ relative to the nucleotide sequence encoding the enhancement element;
[0531] (viii) the encoded signal sequence comprises the amino acid sequence of SEQ ID NO: 1857, or an amino acid sequence at least 85% (e.g., at least 90%, 92%, 95%, 97%, 98%, or 99%) identical thereto; and the encoded enhancement element comprises the amino acid sequence of SEQ ID NO: 1758, or an amino acid sequence having at least one, two, or three but no more than four modifications, e.g., substitutions, relative to SEQ ID NO: 1758; and optionally wherein the encoded signal sequence is located N-terminal relative to the encoded enhancement element;
[0532] (ix) the nucleotide sequence encoding a signal sequence comprising the nucleotide sequence of SEQ ID NO: 1852, or a nucleotide sequence at least 85% (e.g., at least 90%, 92%, 95%, 96%, 97%, 98%, or 99%) identical thereto; and the nucleotide sequence encoding an enhancement element comprising the nucleotide sequence of SEQ ID NO: 1793, or a nucleotide sequence at least 85% (e.g., at least 90%, 92%, 95%, 96%, 97%, 98%, or 99%) identical thereto; and optionally wherein the nucleotide sequence encoding the signal sequence is located 5′ relative to the nucleotide sequence encoding the enhancement element; and/or
[0533] (x) the encoded signal sequence comprises the amino acid sequence of SEQ ID NO: 1853, or an amino acid sequence at least 85% (e.g., at least 90%, 92%, 95%, 96%, 97%, 98%, or 99%) identical thereto; and the encoded enhancement element comprises the amino acid sequence of SEQ ID NO: 1794, or an amino acid sequence having at least one, two, or three but no more than four modifications, e.g., substitutions, relative to SEQ ID NO: 1794; and optionally wherein the encoded signal sequence is located N-terminal relative to the encoded enhancement element.
   413. The isolated nucleic acid of any one of embodiments 1-5, 373, or 376-412, the viral genome of any one of embodiments 374-412, or the AAV particle of any one of embodiments 375-412, wherein the nucleic acid comprises in 5′ to 3′ order: a nucleotide sequence encoding a signal sequence comprising the nucleotide sequence of SEQ ID NO: 1850, or a nucleotide sequence at least 85% (e.g., at least 90%, 92%, 95%, 96%, 97%, 98%, or 99%) identical thereto; and a nucleotide sequence encoding a GBA protein comprising the nucleotide sequence of SEQ ID NO: 1773, or a nucleotide sequence at least 85% (e.g., at least 90%, 92%, 95%, 96%, 97%, 98%, or 99%) identical thereto.
   414. The isolated nucleic acid of any one of embodiments 1-5, 373 or 376-413, the viral genome of any one of embodiments 374-413, or the AAV particle of any one of embodiments 375-413, wherein the nucleic acid comprises in 5′ to 3′ order:
[0534] (i) a nucleotide sequence encoding a signal sequence comprising the nucleotide sequence of SEQ ID NO: 1852, or a nucleotide sequence at least 85% (e.g., at least 90%, 92%, 95%, 96%, 97%, 98%, or 99%) identical thereto; and a nucleotide sequence encoding a GBA protein comprising the nucleotide sequence of SEQ ID NO: 1781, or a nucleotide sequence at least 85% (e.g., at least 90%, 92%, 95%, 96%, 97%, 98%, or 99%) identical thereto;
[0535] (ii) a nucleotide sequence encoding a signal sequence comprising the nucleotide sequence of SEQ ID NO: 1852, or a nucleotide sequence at least 85% (e.g., at least 90%, 92%, 95%, 96%, 97%, 98%, or 99%) identical thereto; a nucleotide sequence encoding a GBA protein comprising the nucleotide sequence of SEQ ID NO: 1781, or a nucleotide sequence at least 85% (e.g., at least 90%, 92%, 95%, 96%, 97%, 98%, or 99%) identical thereto; and a nucleotide sequence encoding an enhancement element comprising the nucleotide sequence of SEQ ID NO: 1799, or a nucleotide sequence at least 85% (e.g., at least 90%, 92%, 95%, %6%, 97%, 98%, or 99%) identical thereto;
[0536] (iii) a nucleotide sequence encoding a signal sequence comprising the nucleotide sequence of SEQ ID NO: 1852, or a nucleotide sequence at least 85% (e.g., at least 90%, 92%, 95%, 96%, 97%, 98%, or 99%) identical thereto; a nucleotide sequence encoding an enhancement element comprising the nucleotide sequence of SEQ ID NO: 1801, or a nucleotide sequence at least 85% (e.g., at least 90%, 92%, 95%, 96%, 97%, 98%, or 99%) identical thereto; and a nucleotide sequence encoding a GBA protein comprising the nucleotide sequence of SEQ ID NO: 1781, or a nucleotide sequence at least 85% (e.g., at least 90%, 92%, 95%, %6%, 97%, 98%, or 99%) identical thereto;
[0537] (iv) a nucleotide sequence encoding a signal sequence comprising the nucleotide sequence of SEQ ID NO: 1852, or a nucleotide sequence at least 85% (e.g., at least 90%, 92%, 95%, 96%, 97%, 98%, or 99%) identical thereto; a nucleotide sequence encoding a GBA protein comprising the nucleotide sequence of SEQ ID NO: 1781, or a nucleotide sequence at least 85% (e.g., at least 90%, 92%, 95%, 96%, 97%, 98%, or 99%) identical thereto; and a nucleotide sequence encoding an enhancement element comprising the nucleotide sequence of SEQ ID NO: 1803, or a nucleotide sequence at least 85% (e.g., at least 90%, 92%, 95%, 96%, 97%, 98%, or 99%) identical thereto;
[0538] (v) a nucleotide sequence encoding a signal sequence comprising the nucleotide sequence of SEQ ID NO: 1852, or a nucleotide sequence at least 85% (e.g., at least 90%, 92%, 95%, 96%, 97%, 98%, or 99%) identical thereto; a nucleotide sequence encoding a GBA protein comprising the nucleotide sequence of SEQ ID NO: 1781, or a nucleotide sequence at least 85% (e.g., at least 90%, 92%, 95%, 96%, 97%, 98%, or 99%) identical thereto; and a nucleotide sequence encoding an enhancement element comprising the nucleotide sequence of SEQ ID NO: 1805, or a nucleotide sequence at least 85% (e.g., at least 90%, 92%, 95%, 96%, 97%, 98%, or 99%) identical thereto;
[0539] (vi) a nucleotide sequence encoding a signal sequence comprising the nucleotide sequence of SEQ ID NO: 1852, or a nucleotide sequence at least 85% (e.g., at least 90%, 92%, 95%, 96%, 97%, 98%, or 99%) identical thereto; a nucleotide sequence encoding a GBA protein comprising the nucleotide sequence of SEQ ID NO: 1781, or a nucleotide sequence at least 85% (e.g., at least 90%, 92%, 95%, 96%, 97%, 98%, or 99%) identical thereto; a nucleotide sequence encoding a linker comprising the nucleotide sequence of SEQ ID NO: 1730, or a nucleotide sequence at least 85% (e.g., at least 90%, 92%, 95%, 96%, 97%, 98%, or 99%) identical thereto; and a nucleotide sequence encoding an enhancement element comprising the nucleotide sequence of SEQ ID NO: 1797, or a nucleotide sequence at least 85% (e.g., at least 90%, 92%, 95%, 96%, 97%, 98%, or 99%) identical thereto;
[0540] (vii) a nucleotide sequence encoding a signal sequence comprising the nucleotide sequence of SEQ ID NO: 1852, or a nucleotide sequence at least 85% (e.g., at least 90%, 92%, 95%, 96%, 97%, 98%, or 99%) identical thereto; a nucleotide sequence encoding a GBA protein comprising the nucleotide sequence of SEQ ID NO: 1781, or a nucleotide sequence at least 85% (e.g., at least 90%, 92%, 95%, 96%, 97%, 98%, or 99%) identical thereto; a nucleotide sequence encoding a linker comprising the nucleotide sequence of SEQ ID NO: 1730, or a nucleotide sequence at least 85% (e.g., at least 90%, 92%, 95%, 96%, 97%, 98%, or 99%) identical thereto; and a nucleotide sequence encoding an enhancement element comprising the nucleotide sequence of SEQ ID NO: 1793, or a nucleotide sequence at least 85% (e.g., at least 90%, 92%, 95%, 96%, 97%, 98%, or 99%) identical thereto;
[0541] (viii) a nucleotide sequence encoding a first signal sequence comprising the nucleotide sequence of SEQ ID NO: 1852, or a nucleotide sequence at least 85% (e.g., at least 90%, 92%, 95%, 96%, 97%, 98%, or 99%) identical thereto; a nucleotide sequence encoding a GBA protein comprising the nucleotide sequence of SEQ ID NO: 1781, or a nucleotide sequence at least 85% (e.g., at least 90%, 92%, 95%, 96%, 97%, 98%, or 99%) identical thereto; a nucleotide sequence encoding a furin cleavage site comprising the nucleotide sequence of SEQ ID NO: 1724, or a nucleotide sequence at least 85% (e.g., at least 90%, 92%, 95%, 96%, 97%, 98%, or 99%) identical thereto; a nucleotide sequence encoding a T2A polypeptide comprising the nucleotide sequence of SEQ ID NO: 1726, or a nucleotide sequence at least 85% (e.g., at least 90%, 92%, 95%, 96%, 97%, 98%, or 99%) identical thereto; a nucleotide sequence encoding a second signal sequence comprising the nucleotide sequence of SEQ ID NO: 1856, or a nucleotide sequence at least 85% (e.g., at least 90%, 92%, 95%, 96%, 97%, 98%, or 99%) identical thereto; and a nucleotide sequence encoding an enhancement element comprising the nucleotide sequence of SEQ ID NO: 1859, or a nucleotide sequence at least 85% (e.g., at least 90%, 92%, 95%, 96%, 97%, 98%, or 99%) identical thereto;
[0542] (ix) a nucleotide sequence encoding a first signal sequence comprising the nucleotide sequence of SEQ ID NO: 1852, or a nucleotide sequence at least 85% (e.g., at least 90%, 92%, 95%, 96%, 97%, 98%, or 99%) identical thereto; a nucleotide sequence encoding a GBA protein comprising the nucleotide sequence of SEQ ID NO: 1781, or a nucleotide sequence at least 85% (e.g., at least 90%, 92%, 95%, 96%, 97%, 98%, or 99%) identical thereto; a nucleotide sequence encoding a furin cleavage site comprising the nucleotide sequence of SEQ ID NO: 1724, or a nucleotide sequence at least 85% (e.g., at least 90%, 92%, 95%, 96%, 97%, 98%, or 99%) identical thereto; a nucleotide sequence encoding a T2A polypeptide comprising the nucleotide sequence of SEQ ID NO: 1726, or a nucleotide sequence at least 85% (e.g., at least 90%, 92%, 95%, 96%, 97%, 98%, or 99%) identical thereto; a nucleotide sequence encoding a second signal sequence comprising the nucleotide sequence of SEQ ID NO: 1856, or a nucleotide sequence at least 85% (e.g., at least 90%, 92%, 95%, 96%, 97%, 98%, or 99%) identical thereto; and a nucleotide sequence encoding an enhancement element comprising the nucleotide sequence of SEQ ID NO: 1787, or a nucleotide sequence at least 85% (e.g., at least 90%, 92%, 95%, 96%, 97%, 98%, or 99%) identical thereto;
[0543] (x) a nucleotide sequence encoding a first signal sequence comprising the nucleotide sequence of SEQ ID NO: 1852, or a nucleotide sequence at least 85% (e.g., at least 90%, 92%, 95%, 96%, 97%, 98%, or 99%) identical thereto; a nucleotide sequence encoding a GBA protein comprising the nucleotide sequence of SEQ ID NO: 1781, or a nucleotide sequence at least 85% (e.g., at least 90%, 92%, 95%, 96%, 97%, 98%, or 99%) identical thereto; a nucleotide sequence encoding a furin cleavage site comprising the nucleotide sequence of SEQ ID NO: 1724, or a nucleotide sequence at least 85% (e.g., at least 90%, 92%, 95%, 96%, 97%, 98%, or 99%) identical thereto; a nucleotide sequence encoding a T2A polypeptide comprising the nucleotide sequence of SEQ ID NO: 1726, or a nucleotide sequence at least 85% (e.g., at least 90%, 92%, 95%, 96%, 97%, 98%, or 99%) identical thereto; a nucleotide sequence encoding a second signal sequence comprising the nucleotide sequence of SEQ ID NO: 1856, or a nucleotide sequence at least 85% (e.g., at least 90%, 92%, 95%, 96%, 97%, 98%, or 99%) identical thereto; and a nucleotide sequence encoding an enhancement element comprising the nucleotide sequence of SEQ ID NO: 1791, or a nucleotide sequence at least 85% (e.g., at least 90%, 92%, 95%, 96%, 97%, 98%, or 99%) identical thereto;
[0544] (xi) a nucleotide sequence encoding a signal sequence comprising the nucleotide sequence of SEQ ID NO: 1852, or a nucleotide sequence at least 85% (e.g., at least 90%, 92%, 95%, 96%, 97%, 98%, or 99%) identical thereto; a nucleotide sequence encoding a GBA protein comprising the nucleotide sequence of SEQ ID NO: 1781, or a nucleotide sequence at least 85% (e.g., at least 90%, 92%, 95%, 96%, 97%, 98%, or 99%) identical thereto; a nucleotide sequence encoding a linker comprising the nucleotide sequence of SEQ ID NO: 1730, or a nucleotide sequence at least 85% (e.g., at least 90%, 92%, 95%, 96%, 97%, 98%, or 99%) identical thereto; and a nucleotide sequence encoding an enhancement element comprising the nucleotide sequence of SEQ ID NO: 1795, or a nucleotide sequence at least 85% (e.g., at least 90%, 92%, 95%, 96%, 97%, 98%, or 99%) identical thereto;
[0545] (xii) a nucleotide sequence encoding a signal sequence comprising the nucleotide sequence of SEQ ID NO: 1852, or a nucleotide sequence at least 85% (e.g., at least 90%, 92%, 95%, 96%, 97%, 98%, or 99%) identical thereto; a nucleotide sequence encoding an enhancement element comprising the nucleotide sequence of SEQ ID NO: 1793, or a nucleotide sequence at least 85% (e.g., at least 90%, 92%, 95%, 96%, 97%, 98%, or 99%) identical thereto; a nucleotide sequence encoding a linker comprising the nucleotide sequence of SEQ ID NO: 1730, or a nucleotide sequence at least 85% (e.g., at least 90%, 92%, 95%, 96%, 97%, 98%, or 99%) identical thereto; and a nucleotide sequence encoding a GBA protein comprising the nucleotide sequence of SEQ ID NO: 1781, or a nucleotide sequence at least 85% (e.g., at least 90%, 92%, 95%, %6%, 97%, 98%, or 99%) identical thereto;
[0546] (xiii) a nucleotide sequence encoding a signal sequence comprising the nucleotide sequence of SEQ ID NO: 1852, or a nucleotide sequence at least 85% (e.g., at least 90%, 92%, 95%, 96%, 97%, 98%, or 99%) identical thereto; a nucleotide sequence encoding a GBA protein comprising the nucleotide sequence of SEQ ID NO: 1781, or a nucleotide sequence at least 85% (e.g., at least 90%, 92%, 95%, 96%, 97%, 98%, or 99%) identical thereto; and a nucleotide sequence encoding an enhancement element comprising the nucleotide sequence of SEQ ID NO: 1807, or a nucleotide sequence at least 85% (e.g., at least 90%, 92%, 95%, 96%, 97%, 98%, or 99%) identical thereto;
[0547] (xiv) a nucleotide sequence encoding a first signal sequence comprising the nucleotide sequence of SEQ ID NO: 1852, or a nucleotide sequence at least 85% (e.g., at least 90%, 92%, 95%, 96%, 97%, 98%, or 99%) identical thereto; a nucleotide sequence encoding a first enhancement element comprising the nucleotide sequence of SEQ ID NO: 1801, or a nucleotide sequence at least 85% (e.g., at least 90%, 92%, 95%, 96%, 97%, 98%, or 99%) identical thereto; a nucleotide sequence encoding a GBA protein comprising the nucleotide sequence of SEQ ID NO: 1781, or a nucleotide sequence at least 85% (e.g., at least 90%, 92%, 95%, 96%, 97%, 98%, or 99%) identical thereto; a nucleotide sequence encoding a furin cleavage site comprising the nucleotide sequence of SEQ ID NO: 1724, or a nucleotide sequence at least 85% (e.g., at least 90%, 92%, 95%, 96%, 97%, 98%, or 99%) identical thereto; a nucleotide sequence encoding a T2A polypeptide comprising the nucleotide sequence of SEQ ID NO: 1726, or a nucleotide sequence at least 85% (e.g., at least 90%, 92%, 95%, 96%, 97%, 98%, or 99%) identical thereto; a nucleotide sequence encoding a second signal sequence comprising the nucleotide sequence of SEQ ID NO: 1856, or a nucleotide sequence at least 85% (e.g., at least 90%, 92%, 95%, 96%, 97%, 98%, or 99%) identical thereto; and a nucleotide sequence encoding a second enhancement element comprising the nucleotide sequence of SEQ ID NO: 1787, or a nucleotide sequence at least 85% (e.g., at least 90%, 92%, 95%, 96%, 97%, 98%, or 99%) identical thereto;
[0548] (xv) a nucleotide sequence encoding a first signal sequence comprising the nucleotide sequence of SEQ ID NO: 1852, or a nucleotide sequence at least 85% (e.g., at least 90%, 92%, 95%, 96%, 97%, 98%, or 99%) identical thereto; a nucleotide sequence encoding a GBA protein comprising the nucleotide sequence of SEQ ID NO: 1781, or a nucleotide sequence at least 85% (e.g., at least 90%, 92%, 95%, 96%, 97%, 98%, or 99%) identical thereto; a nucleotide sequence encoding a linker comprising the nucleotide sequence of SEQ ID NO: 1730, or a nucleotide sequence at least 85% (e.g., at least 90%, 92%, 95%, 96%, 97%, 98%, or 99%) identical thereto; a nucleotide sequence encoding a first enhancement element comprising the nucleotide sequence of SEQ ID NO: 1797, or a nucleotide sequence at least 85% (e.g., at least 90%, 92%, 95%, 96%, 97%, 98%, or 99%) identical thereto; a nucleotide sequence encoding a furin cleavage site comprising the nucleotide sequence of SEQ ID NO: 1724, or a nucleotide sequence at least 85% (e.g., at least 90%, 92%, 95%, 96%, 97%, 98%, or 99%) identical thereto; a nucleotide sequence encoding a T2A polypeptide comprising the nucleotide sequence of SEQ ID NO: 1726, or a nucleotide sequence at least 85% (e.g., at least 90%, 92%, 95%, 96%, 97%, 98%, or 99%) identical thereto; a nucleotide sequence encoding a second signal sequence comprising the nucleotide sequence of SEQ ID NO: 1856, or a nucleotide sequence at least 85% (e.g., at least 90%, 92%, 95%, 96%, 97%, 98%, or 99%) identical thereto; and a nucleotide sequence encoding a second enhancement element comprising the nucleotide sequence of SEQ ID NO: 1787, or a nucleotide sequence at least 85% (e.g., at least 90%, 92%, 95%, 96%, 97%, 98%, or 99%) identical thereto;
[0549] (xvi) a nucleotide sequence encoding a first signal sequence comprising the nucleotide sequence of SEQ ID NO: 1852, or a nucleotide sequence at least 85% (e.g., at least 90%, 92%, 95%, 96%, 97%, 98%, or 99%) identical thereto; a nucleotide sequence encoding a first enhancement element comprising the nucleotide sequence of SEQ ID NO: 1801, or a nucleotide sequence at least 85% (e.g., at least 90%, 92%, 95%, 96%, 97%, 98%, or 99%) identical thereto; a nucleotide sequence encoding a GBA protein comprising the nucleotide sequence of SEQ ID NO: 1781, or a nucleotide sequence at least 85% (e.g., at least 90%, 92%, 95%, 96%, 97%, 98%, or 99%) identical thereto; a nucleotide sequence encoding a linker comprising the nucleotide sequence of SEQ ID NO: 1730, or a nucleotide sequence at least 85% (e.g., at least 90%, 92%, 95%, 96%, 97%, 98%, or 99%) identical thereto; a nucleotide sequence encoding a first enhancement element comprising the nucleotide sequence of SEQ ID NO: 1797, or a nucleotide sequence at least 85% (e.g., at least 90%, 92%, 95%, 96%, 97%, 98%, or 99%) identical thereto; a nucleotide sequence encoding a furin cleavage site comprising the nucleotide sequence of SEQ ID NO: 1724, or a nucleotide sequence at least 85% (e.g., at least 90%, 92%, 95%, 96%, 97%, 98%, or 99%) identical thereto; a nucleotide sequence encoding a T2A polypeptide comprising the nucleotide sequence of SEQ ID NO: 1726, or a nucleotide sequence at least 85% (e.g., at least 90%, 92%, 95%, 96%, 97%, 98%, or 99%) identical thereto; a nucleotide sequence encoding a second signal sequence comprising the nucleotide sequence of SEQ ID NO: 1856, or a nucleotide sequence at least 85% (e.g., at least 90%, 92%, 95%, 96%, 97%, 98%, or 99%) identical thereto; and a nucleotide sequence encoding a second enhancement element comprising the nucleotide sequence of SEQ ID NO: 1787, or a nucleotide sequence at least 85% (e.g., at least 90%, 92%, 95%, 96%, 97%, 98%, or 99%) identical thereto;
[0550] (xvii) a nucleotide sequence encoding a signal sequence comprising the nucleotide sequence of SEQ ID NO: 1851, or a nucleotide sequence at least 85% (e.g., at least 90%, 92%, 95%, 96%, 97%, 98%, or 99%) identical thereto; and a nucleotide sequence encoding a GBA protein comprising the nucleotide sequence of SEQ ID NO: 1777, or a nucleotide sequence at least 85% (e.g., at least 90%, 92%, 95%, 96%, 97%, 98%, or 99%) identical thereto;
[0551] (xviii) a nucleotide sequence encoding a first signal sequence comprising the nucleotide sequence of SEQ ID NO: 1851, or a nucleotide sequence at least 85% (e.g., at least 90%, 92%, 95%, 96%, 97%, 98%, or 99%) identical thereto; a nucleotide sequence encoding a GBA protein comprising the nucleotide sequence of SEQ ID NO: 1777, or a nucleotide sequence at least 85% (e.g., at least 90%, 92%, 95%, 96%, 97%, 98%, or 99%) identical thereto; a nucleotide sequence encoding a furin cleavage site comprising the nucleotide sequence of SEQ ID NO: 1724, or a nucleotide sequence at least 85% (e.g., at least 90%, 92%, 95%, 96%, 97%, 98%, or 99%) identical thereto; a nucleotide sequence encoding a T2A polypeptide comprising the nucleotide sequence of SEQ ID NO: 1726, or a nucleotide sequence at least 85% (e.g., at least 90%, 92%, 95%, 96%, 97%, 98%, or 99%) identical thereto; a nucleotide sequence encoding a second signal sequence comprising the nucleotide sequence of SEQ ID NO: 1856, or a nucleotide sequence at least 85% (e.g., at least 90%, 92%, 95%, 96%, 97%, 98%, or 99%) identical thereto; and a nucleotide sequence encoding an enhancement element comprising the nucleotide sequence of SEQ ID NO: 1787, or a nucleotide sequence at least 85% (e.g., at least 90%, 92%, 95%, 96%, 97%, 98%, or 99%) identical thereto;
[0552] (xix) a nucleotide sequence encoding a signal sequence comprising the nucleotide sequence of SEQ ID NO: 1851, or a nucleotide sequence at least 85% (e.g., at least 90%, 92%, 95%, 96%, 97%, 98%, or 99%) identical thereto; a nucleotide sequence encoding a GBA protein comprising the nucleotide sequence of SEQ ID NO: 1777, or a nucleotide sequence at least 85% (e.g., at least 90%, 92%, 95%, 96%, 97%, 98%, or 99%) identical thereto; a nucleotide sequence encoding a linker comprising the nucleotide sequence of SEQ ID NO: 1730, or a nucleotide sequence at least 85% (e.g., at least 90%, 92%, 95%, 96%, 97%, 98%, or 99%) identical thereto; and a nucleotide sequence encoding an enhancement element comprising the nucleotide sequence of SEQ ID NO: 1797, or a nucleotide sequence at least 85% (e.g., at least 90%, 92%, 95%, 96%, 97%, 98%, or 99%) identical thereto;
[0553] (xx) a nucleotide sequence encoding a signal sequence comprising the nucleotide sequence of SEQ ID NO: 1851, or a nucleotide sequence at least 85% (e.g., at least 90%, 92%, 95%, 96%, 97%, 98%, or 99%) identical thereto; a nucleotide sequence encoding an enhancement element comprising the nucleotide sequence of SEQ ID NO: 1801, or a nucleotide sequence at least 85% (e.g., at least 90%, 92%, 954, 96%, 97%, 98%, or 99%) identical thereto; and a nucleotide sequence encoding a GBA protein comprising the nucleotide sequence of SEQ ID NO: 1777, or a nucleotide sequence at least 85% (e.g., at least 90%, 92%, 95%, 96%, 974, 98%, or 99%) identical thereto;
[0554] (xxi) a nucleotide sequence encoding a signal sequence comprising the nucleotide sequence of SEQ ID NO: 1851, or a nucleotide sequence at least 85% (e.g., at least 90%, 92%, 95%, 96%, 97%, 98%, or 99%) identical thereto; a nucleotide sequence encoding a GBA protein comprising the nucleotide sequence of SEQ ID NO: 1777, or a nucleotide sequence at least 85% (e.g., at least 90%, 92%, 95%, 96%, 97%, 98%, or 99%) identical thereto; and a nucleotide sequence encoding an enhancement element comprising the nucleotide sequence of SEQ ID NO: 1805, or a nucleotide sequence at least 85% (e.g., at least 90%, 92%, 95%, 96%, 97%, 98%, or 99%) identical thereto;
[0555] (xxii) a nucleotide sequence encoding a first signal sequence comprising the nucleotide sequence of SEQ ID NO: 1850, or a nucleotide sequence at least 85% (e.g., at least 90%, 92%, 95%, 96%, 97%, 98%, or 99%) identical thereto; a nucleotide sequence encoding a GBA protein comprising the nucleotide sequence of SEQ ID NO: 1773, or a nucleotide sequence at least 85% (e.g., at least 90%, 92%, 95%, 96%, 97%, 98%, or 99%) identical thereto; a nucleotide sequence encoding a furin cleavage site comprising the nucleotide sequence of SEQ ID NO: 1724, or a nucleotide sequence at least 85% (e.g., at least 90%, 92%, 95%, 96%, 97%, 98%, or 99%) identical thereto; a nucleotide sequence encoding a T2A polypeptide comprising the nucleotide sequence of SEQ ID NO: 1726, or a nucleotide sequence at least 85% (e.g., at least 90%, 92%, 95%, 96%, 97%, 98%, or 99%) identical thereto; a nucleotide sequence encoding a second signal sequence comprising the nucleotide sequence of SEQ ID NO: 1856, or a nucleotide sequence at least 85% (e.g., at least 90%, 92%, 95%, 96%, 97%, 98%, or 99%) identical thereto; and a nucleotide sequence encoding an enhancement element comprising the nucleotide sequence of SEQ ID NO: 1787, or a nucleotide sequence at least 85% (e.g., at least 90%, 92%, 95%, 96%, 97%, 98%, or 99%) identical thereto;
[0556] (xxiii) a nucleotide sequence encoding a signal sequence comprising the nucleotide sequence of SEQ ID NO: 1850, or a nucleotide sequence at least 85% (e.g., at least 90%, 92%, 95%, 96%, 97%, 98%, or 99%) identical thereto; a nucleotide sequence encoding a GBA protein comprising the nucleotide sequence of SEQ ID NO: 1773, or a nucleotide sequence at least 85% (e.g., at least 90%, 92%, 95%, 96%, 97%, 98%, or 99%) identical thereto; a nucleotide sequence encoding a linker comprising the nucleotide sequence of SEQ ID NO: 1730, or a nucleotide sequence at least 85% (e.g., at least 90%, 92%, 95%, 96%, 97%, 98%, or 99%) identical thereto; and a nucleotide sequence encoding an enhancement element comprising the nucleotide sequence of SEQ ID NO: 1797, or a nucleotide sequence at least 85% (e.g., at least 90%, 92%, 95%, 96%, 97%, 98%, or 99%) identical thereto;
[0557] (xxiv) a nucleotide sequence encoding a signal sequence comprising the nucleotide sequence of SEQ ID NO: 1850, or a nucleotide sequence at least 85% (e.g., at least 90%, 92%, 95%, 96%, 97%, 98%, or 99%) identical thereto; a nucleotide sequence encoding an enhancement element comprising the nucleotide sequence of SEQ ID NO: 1801, or a nucleotide sequence at least 85% (e.g., at least 90%, 92%, 954, 96%, 97%, 98%, or 99%) identical thereto; and a nucleotide sequence encoding a GBA protein comprising the nucleotide sequence of SEQ ID NO: 1773, or a nucleotide sequence at least 85% (e.g., at least 90%, 92%, 95%, 96%, 974, 98%, or 99%) identical thereto;
[0558] (xxv) a nucleotide sequence encoding a signal sequence comprising the nucleotide sequence of SEQ ID NO: 1850, or a nucleotide sequence at least 85% (e.g., at least 90%, 92%, 95%, 96%, 97%, 98%, or 99%) identical thereto; a nucleotide sequence encoding a GBA protein comprising the nucleotide sequence of SEQ ID NO: 1773, or a nucleotide sequence at least 85% (e.g., at least 90%, 92%, 95%, 96%, 97%, 98%, or 99%) identical thereto; and a nucleotide sequence encoding an enhancement element comprising the nucleotide sequence of SEQ ID NO: 1805, or a nucleotide sequence at least 85% (e.g., at least 90%, 92%, 95%, 96%, 97%, 98%, or 99%) identical thereto;
[0559] (xxvi) a nucleotide sequence encoding a signal sequence comprising the nucleotide sequence of SEQ ID NO: 1851, or a nucleotide sequence at least 85% (e.g., at least 90%, 92%, 95%, 96%, 97%, 98%, or 99%) identical thereto; a nucleotide sequence encoding a GBA protein comprising the nucleotide sequence of SEQ ID NO: 1777, or a nucleotide sequence at least 85% (e.g., at least 90%, 92%, 95%, 96%, 97%, 98%, or 99%) identical thereto; a nucleotide sequence encoding a linker comprising the nucleotide sequence of SEQ ID NO: 1730, or a nucleotide sequence at least 85% (e.g., at least 90%, 92%, 95%, 96%, 97%, 98%, or 99%) identical thereto; and a nucleotide sequence encoding an enhancement element comprising the nucleotide sequence of SEQ ID NO: 1793, or a nucleotide sequence at least 85% (e.g., at least 90%, 92%, 95%, 96%, 97%, 98%, or 99%) identical thereto; or
[0560] (xxvii) a nucleotide sequence encoding a signal sequence comprising the nucleotide sequence of SEQ ID NO: 1850, or a nucleotide sequence at least 85% (e.g., at least 90%, 92%, 95%, 96%, 97%, 98%, or 99%) identical thereto; a nucleotide sequence encoding a GBA protein comprising the nucleotide sequence of SEQ ID NO: 1773, or a nucleotide sequence at least 85% (e.g., at least 90%, 92%, 95%, 96%, 97%, 98%, or 99%) identical thereto; a nucleotide sequence encoding a linker comprising the nucleotide sequence of SEQ ID NO: 1730, or a nucleotide sequence at least 85% (e.g., at least 90%, 92%, 95%, 96%, 97%, 98%, or 99%) identical thereto; and a nucleotide sequence encoding an enhancement element comprising the nucleotide sequence of SEQ ID NO: 1793, or a nucleotide sequence at least 85% (e.g., at least 90%, 92%, 95%, 96%, 97%, 98%, or 99%) identical thereto.
   415. The isolated nucleic acid of any one of embodiments 1-5, 373 or 376-414, the viral genome of any one of embodiments 374-414, or the AAV particle of any one of embodiments 375-414, wherein the nucleic acid encodes in 5′ to 3′ order: a signal sequence comprising the amino acid sequence of SEQ ID NO: 1853, or an amino acid sequence at least 85% (e.g., at least 90%, 92%, 95%, 96%, 97%, 98%, or 99%) identical thereto; and a GBA protein comprising the amino acid sequence of SEQ ID NO: 1775, or an amino acid sequence at least 85% (e.g., at least 90%, 92%, 95%, 96%, 97%, 98%, or 99%) identical thereto.
   416. The isolated nucleic acid of any one of embodiments 1-5, 373, or 376-415, the viral genome of any one of embodiments 374-415, or the AAV particle of any one of embodiments 375-415, wherein the nucleic acid encodes in 5′ to 3′ order:
[0561] (i) a signal sequence comprising the amino acid sequence of SEQ ID NO: 1853, or an amino acid sequence at least 85% (e.g., at least 90%, 92%, 95%, 96%, 97%, 98%, or 99%) identical thereto; a GBA protein comprising the amino acid sequence of SEQ ID NO: 1775, or an amino acid sequence at least 85% (e.g., at least 90%, 92%, 95%, 96%, 97%, 98%, or 99%) identical thereto; and an enhancement element comprising the amino acid sequence of SEQ ID NO: 1800, or an amino acid sequence having at least one, two, or three but no more than four modifications, e.g., substitutions, relative to SEQ ID NO: 1800;
[0562] (ii) a signal sequence comprising the amino acid sequence of SEQ ID NO: 1853, or an amino acid sequence at least 85% (e.g., at least 90%, 92%, 95%, 96%, 97%, 98%, or 99%) identical thereto; an enhancement element comprising the amino acid sequence of SEQ ID NO: 1802, or an amino acid sequence at least 85% (e.g., at least 90%, 92%, 95%, 96%, 97%, 98%, or 99%) identical thereto; and a GBA protein comprising the amino acid sequence of SEQ ID NO: 1775, or an amino acid sequence at least 85% (e.g., at least 90%, 92%, 95%, 96%, 97%, 98%, or 99%) identical thereto;
[0563] (iii) a signal sequence comprising the amino acid sequence of SEQ ID NO: 1853, or an amino acid sequence at least 85% (e.g., at least 90%, 92%, 95%, 96%, 97%, 98%, or 99%) identical thereto; a GBA protein comprising the amino acid sequence of SEQ ID NO: 1775, or an amino acid sequence at least 85% (e.g., at least 90%, 92%, 95%, 96%, 97%, 98%, or 99%) identical thereto; and an enhancement element comprising the amino acid sequence of SEQ ID NO: 1804, or an amino acid sequence having at least one, two, or three but no more than four modifications, e.g., substitutions, relative to SEQ ID NO: 1804;
[0564] (iv) a signal sequence comprising the amino acid sequence of SEQ ID NO: 1853, or an amino acid sequence at least 85% (e.g., at least 90%, 92%, 95%, 96%, 97%, 98%, or 99%) identical thereto; a GBA protein comprising the amino acid sequence of SEQ ID NO: 1775, or an amino acid sequence at least 85% (e.g., at least 90%, 92%, 95%, 96%, 97%, 98%, or 99%) identical thereto; and an enhancement element comprising the amino acid sequence of SEQ ID NO: 1806, or an amino acid sequence having at least one, two, or three but no more than four modifications, e.g., substitutions, relative to SEQ ID NO: 1806;
[0565] (v) a signal sequence comprising the amino acid sequence of SEQ ID NO: 1853, or an amino acid sequence at least 85% (e.g., at least 90%, 92%, 95%, 96%, 97%, 98%, or 99%) identical thereto; a GBA protein comprising the amino acid sequence of SEQ ID NO: 1775, or an amino acid sequence at least 85% (e.g., at least 90%, 92%, 95%, 96%, 97%, 98%, or 99%) identical thereto; a linker comprising the amino acid sequence of SEQ ID NO: 1845, or an amino acid sequence having at least one, two, or three but no more than four modifications, e.g., substitutions, relative to SEQ ID NO: 1845; and an enhancement element comprising the amino acid sequence of SEQ ID NO: 1798, or an amino acid sequence having at least one, two, or three but no more than four modifications, e.g., substitutions, relative to SEQ ID NO: 1798;
[0566] (vi) a signal sequence comprising the amino acid sequence of SEQ ID NO: 1853, or an amino acid sequence at least 85% (e.g., at least 90%, 92%, 95%, 96%, 97%, 98%, or 99%) identical thereto; a GBA protein comprising the amino acid sequence of SEQ ID NO: 1775, or an amino acid sequence at least 85% (e.g., at least 90%, 92%, 95%, 96%, 97%, 98%, or 99%) identical thereto; a linker comprising the amino acid sequence of SEQ ID NO: 1845, or an amino acid sequence having at least one, two, or three but no more than four modifications, e.g., substitutions, relative to SEQ ID NO: 1845; and an enhancement element comprising the amino acid sequence of SEQ ID NO: 1794, or an amino acid sequence having at least one, two, or three but no more than four modifications, e.g., substitutions, relative to SEQ ID NO: 1794;
[0567] (vii) a first signal sequence comprising the amino acid sequence of SEQ ID NO: 1853, or an amino acid sequence at least 85% (e.g., at least 90%, 92%, 95%, 96%, 97%, 98%, or 99%) identical thereto; a GBA protein comprising the amino acid sequence of SEQ ID NO: 1775, or an amino acid sequence at least 85% (e.g., at least 90%, 92%, 95%, 96%, 97%, 98%, or 99%) identical thereto; a furin cleavage site comprising the amino acid sequence of SEQ ID NO: 1854, or an amino acid sequence having at least one, two, or three but no more than four modifications, e.g., substitutions, relative to SEQ ID NO: 1854; a T2A polypeptide comprising the amino acid sequence of SEQ ID NO: 1855, or an amino acid sequence having at least one, two, or three but no more than four modifications, e.g., substitutions, relative to SEQ ID NO: 1855; a second signal sequence comprising the nucleotide sequence of SEQ ID NO: 1857, or an amino acid sequence having at least one, two, or three but no more than four modifications, e.g., substitutions, relative to SEQ ID NO: 1857; and an enhancement element comprising the amino acid sequence of SEQ ID NO: 1785, or an amino acid sequence at least 85% (e.g., at least 90%, 92%, 95%, 96%, 97%, 98%, or 99%) identical thereto;
[0568] (viii) a first signal sequence comprising the amino acid sequence of SEQ ID NO: 1853, or an amino acid sequence at least 85% (e.g., at least 90%, 92%, 95%, 96%, 97%, 98%, or 99%) identical thereto; a GBA protein comprising the amino acid sequence of SEQ ID NO: 1775, or an amino acid sequence at least 85% (e.g., at least 90%, 92%, 95%, 96%, 97%, 98%, or 99%) identical thereto; a furin cleavage site comprising the amino acid sequence of SEQ ID NO: 1854, or an amino acid sequence having at least one, two, or three but no more than four modifications, e.g., substitutions, relative to SEQ ID NO: 1854; a T2A polypeptide comprising the amino acid sequence of SEQ ID NO: 1855, or an amino acid sequence having at least one, two, or three but no more than four modifications, e.g., substitutions, relative to SEQ ID NO: 1855; a second signal sequence comprising the nucleotide sequence of SEQ ID NO: 1857, or an amino acid sequence having at least one, two, or three but no more than four modifications, e.g., substitutions, relative to SEQ ID NO: 1857; and an enhancement element comprising the amino acid sequence of SEQ ID NO: 1789, or an amino acid sequence at least 85% (e.g., at least 90%, 92%, 95%, 96%, 97%, 98%, or 99%) identical thereto;
[0569] (ix) a first signal sequence comprising the amino acid sequence of SEQ ID NO: 1853, or an amino acid sequence at least 85% (e.g., at least 90%, 92%, 95%, 96%, 97%, 98%, or 99%) identical thereto; a GBA protein comprising the amino acid sequence of SEQ ID NO: 1775, or an amino acid sequence at least 85% (e.g., at least 90%, 92%, 95%, 96%, 97%, 98%, or 99%) identical thereto; a furin cleavage site comprising the amino acid sequence of SEQ ID NO: 1854, or an amino acid sequence having at least one, two, or three but no more than four modifications, e.g., substitutions, relative to SEQ ID NO: 1854; a T2A polypeptide comprising the amino acid sequence of SEQ ID NO: 1855, or an amino acid sequence having at least one, two, or three but no more than four modifications, e.g., substitutions, relative to SEQ ID NO: 1855; a second signal sequence comprising the nucleotide sequence of SEQ ID NO: 1857, or an amino acid sequence having at least one, two, or three but no more than four modifications, e.g., substitutions, relative to SEQ ID NO: 1857; and an enhancement element comprising the amino acid sequence of SEQ ID NO: 1758, or an amino acid sequence at least 85% (e.g., at least 90%, 92%, 95%, 96%, 97%, 98%, or 99%) identical thereto;
[0570] (x) a signal sequence comprising the amino acid sequence of SEQ ID NO: 1853, or an amino acid sequence at least 85% (e.g., at least 90%, 92%, 95%, 96%, 97%, 98%, or 99%) identical thereto; a GBA protein comprising the amino acid sequence of SEQ ID NO: 1775, or an amino acid sequence at least 85% (e.g., at least 90%, 92%, 95%, 96%, 97%, 98%, or 99%) identical thereto; a linker comprising the amino acid sequence of SEQ ID NO: 1845, or an amino acid sequence having at least one, two, or three but no more than four modifications, e.g., substitutions, relative to SEQ ID NO: 1845; and an enhancement element comprising the amino acid sequence of SEQ ID NO: 1796, or an amino acid sequence at least 85% (e.g., at least 90%, 92%, 95%, 96%, 97%, 98%, or 99%) identical thereto;
[0571] (xi) a signal sequence comprising the amino acid sequence of SEQ ID NO: 1853, or an amino acid sequence at least 85% (e.g., at least 90%, 92%, 95%, 96%, 97%, 98%, or 99%) identical thereto; an enhancement element comprising the amino acid sequence of SEQ ID NO: 1794, or an amino acid sequence having at least one, two, or three but no more than four modifications, e.g., substitutions, relative to SEQ ID NO: 1794; a linker comprising the amino acid sequence of SEQ ID NO: 1845, or an amino acid sequence having at least one, two, or three but no more than four modifications, e.g., substitutions, relative to SEQ ID NO: 1845; and a GBA protein comprising the amino acid sequence of SEQ ID NO: 1775, or an amino acid sequence at least 85% (e.g., at least 90%, 92%, 95%, 96%, 97%, 98%, or 99%) identical thereto;
[0572] (xii) a signal sequence comprising the amino acid sequence of SEQ ID NO: 1853, or an amino acid sequence at least 85% (e.g., at least 90%, 92%, 95%, 96%, 97%, 98%, or 99%) identical thereto; a GBA protein comprising the amino acid sequence of SEQ ID NO: 1775, or an amino acid sequence at least 85% (e.g., at least 90%, 92%, 95%, 96%, 97%, 98%, or 99%) identical thereto; and an enhancement element comprising the amino acid sequence of SEQ ID NO: 1808, or an amino acid sequence having at least one, two, or three but no more than four modifications, e.g., substitutions, relative to SEQ ID NO: 1808;
[0573] (xiii) a first signal sequence comprising the amino acid sequence of SEQ ID NO: 1853, or an amino acid sequence at least 85% (e.g., at least 90%, 92%, 95%, 96%, 97%, 98%, or 99%) identical thereto; a first enhancement element comprising the amino acid sequence of SEQ ID NO: 1802, or an amino acid sequence at least 85% (e.g., at least 90%, 92%, 95%, 96%, 97%, 98%, or 99%) identical thereto; a GBA protein comprising the amino acid sequence of SEQ ID NO: 1775, or an amino acid sequence at least 85% (e.g., at least 90%, 92%, 95%, 96%, 97%, 98%, or 99%) identical thereto; a furin cleavage site comprising the amino acid sequence of SEQ ID NO: 1854, or an amino acid sequence having at least one, two, or three but no more than four modifications, e.g., substitutions, relative to SEQ ID NO: 1854; a T2A polypeptide comprising the amino acid sequence of SEQ ID NO: 1855, or an amino acid sequence having at least one, two, or three but no more than four modifications, e.g., substitutions, relative to SEQ ID NO: 1855; a second signal sequence comprising the nucleotide sequence of SEQ ID NO: 1857, or an amino acid sequence having at least one, two, or three but no more than four modifications, e.g., substitutions, relative to SEQ ID NO: 1857; and a second enhancement element comprising the amino acid sequence of SEQ ID NO: 1789, or an amino acid sequence at least 85% (e.g., at least 90%, 92%, 95%, 96%, 97%, 98%, or 99%) identical thereto;
[0574] (xiv) a first signal sequence comprising the amino acid sequence of SEQ ID NO: 1853, or an amino acid sequence at least 85% (e.g., at least 90%, 92%, 95%, 96%, 97%, 98%, or 99%) identical thereto; a GBA protein comprising the amino acid sequence of SEQ ID NO: 1775, or an amino acid sequence at least 85% (e.g., at least 90%, 92%, 95%, 96%, 97%, 98%, or 99%) identical thereto; a linker comprising the amino acid sequence of SEQ ID NO: 1845, or an amino acid sequence having at least one, two, or three but no more than four modifications, e.g., substitutions, relative to SEQ ID NO: 1845; a first enhancement element comprising the amino acid sequence of SEQ ID NO: 1798, or an amino acid sequence having at least one, two, or three but no more than four modifications, e.g., substitutions, relative to SEQ ID NO: 1798; a furin cleavage site comprising the amino acid sequence of SEQ ID NO: 1854, or an amino acid sequence having at least one, two, or three but no more than four modifications, e.g., substitutions, relative to SEQ ID NO: 1854; a T2A polypeptide comprising the amino acid sequence of SEQ ID NO: 1855, or an amino acid sequence having at least one, two, or three but no more than four modifications, e.g., substitutions, relative to SEQ ID NO: 1855; a second signal sequence comprising the nucleotide sequence of SEQ ID NO: 1857, or an amino acid sequence having at least one, two, or three but no more than four modifications, e.g., substitutions, relative to SEQ ID NO: 1857; and an enhancement element comprising the amino acid sequence of SEQ ID NO: 1789, or an amino sequence at least 85% (e.g., at least 90%, 92%, 95%, 96%, 97%, 98%, or 99%) identical thereto; or
[0575] (xv) a first signal sequence comprising the amino acid sequence of SEQ ID NO: 1853, or an amino acid sequence at least 85% (e.g., at least 90%, 92%, 95%, 96%, 97%, 98%, or 99%) identical thereto; a first enhancement element comprising the amino acid sequence of SEQ ID NO: 1802, or an amino acid sequence at least 85% (e.g., at least 90%, 92%, 95%, 96%, 97%, 98%, or 99%) identical thereto; a GBA protein comprising the amino acid sequence of SEQ ID NO: 1775, or an amino acid sequence at least 85% (e.g., at least 90%, 92%, 95%, 96%, 97%, 98%, or 99%) identical thereto; a linker comprising the amino acid sequence of SEQ ID NO: 1845, or an amino acid sequence having at least one, two, or three but no more than four modifications, e.g., substitutions, relative to SEQ ID NO: 1845; a first enhancement element comprising the amino acid sequence of SEQ ID NO: 1798, or an amino acid sequence having at least one, two, or three but no more than four modifications, e.g., substitutions, relative to SEQ ID NO: 1798; a furin cleavage site comprising the amino acid sequence of SEQ ID NO: 1854, or an amino acid sequence having at least one, two, or three but no more than four modifications, e.g., substitutions, relative to SEQ ID NO: 1854; a T2A polypeptide comprising the amino acid sequence of SEQ ID NO: 1855, or an amino acid sequence having at least one, two, or three but no more than four modifications, e.g., substitutions, relative to SEQ ID NO: 1855; a second signal sequence comprising the nucleotide sequence of SEQ ID NO: 1857, or an amino acid sequence having at least one, two, or three but no more than four modifications, e.g., substitutions, relative to SEQ ID NO: 1857; and an enhancement element comprising the amino acid sequence of SEQ ID NO: 1789, or an amino acid sequence at least 85% (e.g., at least 90%, 92%, 95%, 96%, 97%, 98%, or 99%) identical thereto.
   417. An isolated, e.g., recombinant viral genome comprising a promoter operably linked to the nucleic acid of any one of embodiments 1-5, 373 or 376-416.
   418. The viral genome of any one of embodiments 374-416, further comprising a promoter operably linked to the nucleic acid comprising the transgene encoding the GBA protein.
   419. The AAV particle of any one of embodiments 6-372, which further comprises a viral genome comprising a promoter operably linked to the nucleic acid encoding the GBA protein.
   420. The viral genome of any one of embodiments 374-417, or the AAV particle of embodiment 419, which further comprises an enhancer.
   421. The viral genome or AAV particle of embodiment 420, wherein the enhancer comprises a CMVie enhancer.
   422. The viral genome or AAV particle of embodiment 420 or 421, wherein the enhancer comprises the nucleotide sequence of SEQ ID NO: 1831, or a nucleotide sequence at least 95% identical thereto.
   423. The viral genome or AAV particle of any one of embodiments 417-422, wherein the promoter comprises a tissue specific promoter or a ubiquitous promoter.
   424. The viral genome or AAV particle of any one of embodiments 417-423, wherein the promoter comprises:
[0576] (i) an EF-1a promoter, a chicken β-actin (CBA) promoter and/or its derivative CAG, a CMV immediate-early enhancer and/or promoter, a β glucuronidase (GUSB) promoter, a ubiquitin C (UBC) promoter, a neuron-specific enolase (NSE), a platelet-derived growth factor (PDGF) promoter, a platelet-derived growth factor B-chain (PDGF-β) promoter, an intercellular adhesion molecule 2 (ICAM-2) promoter, a synapsin (Syn) promoter, a methyl-CpG binding protein 2 (MeCP2) promoter, a Ca2+/calmodulin-dependent protein kinase II (CaMKII) promoter, a metabotropic glutamate receptor 2 (mGluR2) promoter, a neurofilament light (NFL) or heavy (NFH) promoter, a β-globin minigene nP2 promoter, a preproenkephalin (PPE) promoter, an enkephalin (Enk) and excitatory amino acid transporter 2 (EAAT2), a glial fibrillary acidic protein (GFAP) promoter, a myelin basic protein (MBP) promoter, a cardiovascular promoter (e.g., αMHC, cTnT, and CMV-MLC2k), a liver promoter (e.g., hAAT, TBG), a skeletal muscle promoter (e.g., desmin, MCK, C512) or a fragment, e.g., a truncation, or a functional variant thereof;
[0577] (ii) the nucleotide sequence of any of SEQ ID NOs: 1832, 1833, 1834, 1835, 1836, 1839, 1840, or a nucleotide sequence at least 95% identical thereto; and/or
[0578] (iii) the nucleotide sequence of any one of SEQ ID NOs: 1874-1889 or any of the sequences provided in Table 40, a nucleotide sequence comprising at least one, two, or three but no more than four modifications, e.g., substitutions, relative to the nucleotide sequence of SEQ ID NOs: 1874-1889 or any of the sequences provided in Table 40, or a nucleotide sequence with at least 80% (e.g., 85%, 90%, 95%, 96%, 97%, 98%, or 99%) sequence identity to any one of SEQ ID NOs: 1874-1889 or any of the sequences provided in Table 40.
   425. The viral genome or AAV particle of any one of embodiments 417-424, wherein the promoter comprises a CB promoter or functional variant thereof.
   426. The viral genome or the AAV particle of embodiment 425, wherein the CB promoter or functional variant thereof comprises the nucleotide sequence of SEQ ID NO: 1834, or a nucleotide sequence at least 95% identical thereto.
   427. The viral genome or AAV particle of any one of embodiments 417-426, wherein the promoter comprises a CMVie enhancer and a CB promoter.
   428. The viral genome or AAV particle of embodiment 427, wherein the CMVie enhancer comprises the nucleotide sequence of SEQ ID NO: 1831, or a nucleotide sequence at least 95% identical thereto, and the CB promoter comprises the nucleotide sequence of SEQ ID NO: 1834, or a nucleotide sequence at least 95% identical thereto.
   429. The viral genome of any one of embodiments 417-428, or the AAV particle of any one of embodiments 419-428, wherein the promoter comprises an EF-1α promoter or functional variant thereof.
   430. The viral genome or AAV particle of embodiment 429, wherein the EF-1α promoter or functional variant thereof comprises the nucleotide sequence of SEQ ID NO: 1839 or 1840, or a nucleotide sequence at least 95% identical thereto.
   431. The viral genome or AAV particle of embodiment 429 or 430, wherein the EF-1α promoter or functional variant thereof comprises an intron, e.g., an intron comprising the nucleotide sequence of positions 242-1,180 of SEQ ID NO: 1839 or an intron comprising the nucleotide sequence of SEQ ID NO: 1841, or a nucleotide sequence at least 95% identical thereto.
   432. The viral genome or AV particle of any one of embodiments 429-431, wherein the EF-1α promoter or functional variant thereof does not comprise an intron, e.g., an intron comprising the nucleotide sequence of positions 242-1,180 of SEQ ID NO: 1839 or an intron comprising the nucleotide sequence of SEQ ID NO: 1841, or a nucleotide sequence at least 95% identical thereto.
   433. The viral genome of any one of embodiments 417-432, or the AAV particle of any one of embodiments 419-432, wherein the promoter comprises a CBA promoter or functional variant thereof.
   434. The viral genome or AAV particle of embodiment 433, wherein the CBA promoter functional variant thereof comprises the nucleotide sequence of SEQ ID NO: 1836, or a nucleotide sequence at least 95% identical thereto.
   435. The viral genome of any one of embodiments 417-434, or the AAV particle of any one of embodiments 419-434, wherein the promoter comprises a CMVie enhancer, a CBA promoter or functional variant thereof, and an intron.
   436. The viral genome or AAV particle of embodiment 435, wherein:
[0579] (i) the CMVie enhancer comprises the nucleotide sequence of SEQ ID NO: 1831, or a nucleotide sequence at least 95% identical thereto;
[0580] (ii) the CBA promoter or functional variant thereof comprises the nucleotide sequence of SEQ ID NO: 1836, or a nucleotide sequence at least 95% identical thereto; and
[0581] (iii) the intron comprises the nucleotide sequence of SEQ ID NO: 1837, or a nucleotide sequence at least 95% identical thereto.
   437. The viral genome of any one of embodiments 417-436, or the AAV particle of any one of embodiments 419-436, wherein the promoter comprises a CAG promoter region.
   438. The viral genome of any one of embodiments 417-437, or the viral genome of any one of embodiments 419-437, wherein the promoter comprises a CAG promoter region comprises:
[0582] (i) a CMVie enhancer, a CBA promoter or functional variant thereof, and an intron; and/or
[0583] (ii) the nucleotide sequence of SEQ ID NO: 1835, or a nucleotide sequence at least 95% identical thereto.
   439. The viral genome of any one of embodiments 417-438, or the viral genome of any one of embodiments 419-438, wherein the promoter comprises a CMV promoter or functional variant thereof.
   440. The viral genome or AAV particle of embodiment 439, wherein the CMV promoter or functional variant thereof comprises the nucleotide sequence of SEQ ID NO: 1832, or a nucleotide sequence at least 95% identical thereto.
   441. The viral genome of any one of embodiments 417-440, or the AAV particle of any one of embodiments 419-440, wherein the promoter comprises a CMVie enhancer and a CMV promoter or functional variant thereof, optionally wherein the CMVie enhancer comprises the nucleotide sequence of SEQ ID NO: 1831, or a nucleotide sequence at least 95% identical thereto, and the CMV promoter or functional variant thereof comprises the nucleotide sequence of SEQ ID NO: 1832, or a nucleotide sequence at least 95% identical thereto.
   442. The viral genome of any one of embodiments 417-441, or the AAV particle of any one of embodiments 218-240, wherein the promoter comprises a CMV promoter region.
   443. The viral genome or AAV particle of embodiment 442, wherein the CMV promoter region comprises:
[0584] (i) a CMVie enhancer and a CMV promoter or functional variant thereof;
[0585] (ii) the nucleotide sequence of SEQ ID NO: 1833, or a nucleotide sequence at least 95% identical thereto.
   444. The viral genome of any one of embodiments 417-443, or the AAV particle of any one embodiments 419-443, wherein the viral genome further comprises an inverted terminal repeat (ITR) sequence.
   445. The viral genome or AAV particle of embodiment 444, wherein the ITR sequence is positioned 5′ relative to the nucleic acid comprising the transgene encoding the GBA protein.
   446. The viral genome or AAV particle of embodiment 444 or 445, wherein the ITR sequence is positioned 3′ relative to the nucleic acid comprising the transgene encoding the GBA protein.
   447. The viral genome of any one of embodiments 374-446, or the AAV particle of any one of embodiments 419-446, wherein the viral genome comprises an ITR positioned 5′ relative to the nucleic acid comprising the transgene encoding the GBA protein and an ITR positioned 3′ relative to the nucleic acid comprising the transgene encoding the GBA protein.
   448. The viral genome or AAV particle of any one of embodiments 444-447, wherein the ITR comprises a nucleic acid sequence of SEQ ID NO: 1829, 1830, or 1862, or a nucleotide sequence at least 95% identical thereto.
   449. The viral genome or AAV particle of any one of embodiments 444-448, wherein the ITR comprises the nucleotide sequence of SEQ ID NO: 1860 and/or 1861, or a nucleotide sequence having at least one, two, or three modifications, but no more than four modifications of SEQ ID NO: 1860 and/or 1861.
   450. The viral genome or AAV particle of any one of embodiments 444-449, wherein the ITR is positioned 5′ relative to the nucleic acid comprising the transgene encoding the GBA protein and comprises the nucleotide sequence of SEQ ID NO: 1860 and/or 1861, or a nucleotide sequence having at least one, two, or three modifications, but no more than four modifications of SEQ ID NO: 1860 or 1861.
   451. The viral genome or AAV particle of any one of embodiments 444-450, wherein the ITR is positioned 3′ relative to the nucleic acid comprising the transgene encoding the GBA protein and comprises the nucleotide sequence of SEQ ID NO: 1860 or 1861, or a nucleotide sequence having at least one, two, or three modifications, but no more than four modifications of SEQ ID NO: 1860 and/or 1861.
   452. The viral genome or AAV particle of any one of embodiments 444-451, wherein:
[0586] (i) the ITR positioned 5′ relative to the nucleic acid comprising the transgene encoding the GBA protein comprises the nucleotide sequence of SEQ ID NO: 1829, or a nucleotide sequence at least 95% identical thereto; and/or
[0587] (ii) the ITR positioned 3′ relative to the nucleic acid comprising the transgene encoding the GBA protein comprises the nucleotide sequence of SEQ ID NO: 1830, or a nucleotide sequence at least 95% identical thereto.
   453. The viral genome of any one of embodiments 374-452, or the AAV particle of any one of embodiments 419-452, wherein the viral genome further comprises a polyadenylation (polyA) signal region.
   454. The viral genome or AAV particle of embodiment 453, wherein the polyA signal region comprises the nucleotide sequence of SEQ ID NO: 1846, or a nucleotide sequence at least 95% identical thereto.
   455. The viral genome of any one of embodiments 374-454, or the AAV particle of any one of embodiments 419-454, wherein the viral genome further comprises an intron region.
   456. The viral genome or AAV particle of embodiment 455, wherein the intron comprises a beta-globin intron.
   457. The viral genome or AAV particle of embodiment 455 or 456, wherein the intron comprises the nucleotide sequence of SEQ ID NO: 1842, or a nucleotide sequence at least 95% identical thereto.
   458. The viral genome of any one of embodiments 374-457, or the AAV particle of any one of embodiments 419-457, wherein the viral genome further comprises an exon region, e.g., at least one, two, or three exon regions.
   459. The viral genome of any one of embodiments 374-458, or the AAV particle of any one of embodiments 419-458, wherein the viral genome further comprises a Kozak sequence.
   460. The viral genome of any one of embodiments 374-459, or the AAV particle of any one of embodiments 419-459, wherein the viral genome further comprises a nucleotide sequence encoding a miR binding site, e.g., a miR binding site that modulates, e.g., reduces, expression of the GBA protein encoded by the viral genome in a cell or tissue where the corresponding miRNA is expressed.
   461. The viral genome of embodiment 460, or the AAV particle of embodiment 460, wherein the encoded miRNA binding site is complementary, e.g., fully complementary or partially complementary, to a miRNA expressed in a cell or tissue of the DRG, liver, heart, hematopoietic, or a combination thereof.
   462. The viral genome or the AAV particle of embodiment 460 or 461, wherein the encoded miR binding site modulates, e.g., reduces, expression of the encoded GBA protein in a cell or tissue of the DRG, liver, hematopoietic lineage, or a combination thereof.
   463. The viral genome of any one of embodiments 374-462, or the AAV particle of any one of embodiments 419-462, wherein the viral genome comprises at least 1-5 copies of the encoded miR binding site, e.g., at least 1, 2, 3, 4, or 5 copies.
   464. The viral genome of any one of embodiments 374-463, or the AAV particle of any one of embodiments 419-463, wherein the viral genome comprises at least 4 copies of an encoded miR binding sites, optionally wherein all four copies comprise the same miR binding site, or at least one, two, three, or all of the copies comprise a different miR binding site.
   465. The viral genome or AAV particle of embodiment 464, wherein the 4 copies of the encoded miR binding sites are continuous (e.g., not separated by a spacer), or are separated by a spacer.
   466. The viral genome or AAV particle of embodiment 465, wherein the spacer comprises the nucleotide sequence of GATAGTTA, or a nucleotide sequence having at least one, two, or three modifications, but no more than four modifications of GATAGTTA.
   467. The viral genome of any one of embodiments 374-466, or the AAV particle of any one of embodiments 460-466, wherein the encoded miR binding site comprises a miR183 binding site, a miR122 binding site, a miR-1 binding site, a miR-142-3p, or a combination thereof, optionally wherein:
[0588] (i) the encoded miR183 binding site comprises the nucleotide sequence of SEQ ID NO: 1847, or a nucleotide sequence substantially identical (e.g., having at least 70%, 75%, 80%, 85%, 90%, 92%, 95%, 97%, 98%, or 99% sequence identity) thereto; or a nucleotide sequence having at least one, two, three, four, five, six, or seven modifications, but no more than ten modifications of SEQ ID NO: 1847;
[0589] (ii) the encoded miR122 binding site comprises the nucleotide sequence of SEQ ID NO: 1865, or a nucleotide sequence substantially identical (e.g., having at least 70%, 75%, 80%, 85%, 90%, 92%, 95%, 97%, 98%, or 99% sequence identity) thereto; or a nucleotide sequence having at least one, two, three, four, five, six, or seven modifications, but no more than ten modifications of SEQ ID NO: 1865;
[0590] (iii) the encoded miR-1 binding site comprises the nucleotide sequence of SEQ ID NO: 4679, or a nucleotide sequence substantially identical (e.g., having at least 70%, 75%, 80%, 85%, 90%, 92%, 95%, 97%, 98%, or 99% sequence identity) thereto; or a nucleotide sequence having at least one, two, three, four, five, six, or seven modifications, but no more than ten modifications of SEQ ID NO: 4679; and/or
[0591] (iv) the encoded miR-142-3p binding site comprises the nucleotide sequence of SEQ ID NO: 1869, or a nucleotide sequence substantially identical (e.g., having at least 70%, 75%, 80%, 85%, 90%, 92%, 95%, 97%, 98%, or 99% sequence identity) thereto; or a nucleotide sequence having at least one, two, three, four, five, six, or seven modifications, but no more than ten modifications of SEQ ID NO: 1869.
   468. The viral genome of any one of embodiments 374-467, or the AAV particle of any one of embodiments 419-467, wherein the viral genome comprises an encoded miR183 binding site.
   469. The viral genome of any one of embodiments 374-468, or the AAV particle of any one of embodiments 419-468, wherein the viral genome comprises at least 1-5 copies, e.g., 4 copies of a miR183 binding site, optionally wherein each copy is continuous (e.g., not separated by a spacer), or each copy is separated by a spacer.
   470. The viral genome or AAV particle of embodiment 268 or 269, wherein the encoded miR183 binding site comprises the nucleotide sequence of SEQ ID NO: 1847, or a nucleotide sequence substantially identical (e.g., having at least 70%, 75%, 80%, 85%, 90%, 92%, 95%, 97%, 98%, or 99% sequence identity) thereto; or a nucleotide sequence having at least one, two, three, four, five, six, or seven modifications, but no more than ten modifications of SEQ ID NO: 1847.
   471. The viral genome of any one of embodiments 374-470, or the AAV particle of any one of embodiments 419-470, wherein the viral genome comprises:
[0592] (i) a first encoded miR183 binding site comprising the nucleotide sequence of SEQ ID NO: 1847, or a nucleotide sequence substantially identical (e.g., having at least 70%, 75%, 80%, 85%, 90%, 92%, 95%, 97%, 98%, or 99% sequence identity) thereto; or a nucleotide sequence having at least one, two, three, four, five, six, or seven modifications, but no more than ten modifications of SEQ ID NO: 1847;
[0593] (ii) a first spacer sequence comprising the nucleotide sequence of GATAGTTA, or a nucleotide sequence having at least one, two, or three modifications, but no more than four modifications of GATAGTTA;
[0594] (iii) a second encoded miR183 binding site comprising the nucleotide sequence of SEQ ID NO: 1847, or a nucleotide sequence substantially identical (e.g., having at least 70%, 75%, 80%, 85%, 90%, 92%, 95%, 97%, 98%, or 99% sequence identity) thereto; or a nucleotide sequence having at least one, two, three, four, five, six, or seven modifications, but no more than ten modifications of SEQ ID NO: 1847;
[0595] (iv) a second spacer sequence comprising the nucleotide sequence of GATAGTTA, or a nucleotide sequence having at least one, two, or three modifications, but no more than four modifications of GATAGTTA;
[0596] (v) a third encoded miR183 binding site comprising the nucleotide sequence of SEQ ID NO: 1847, or a nucleotide sequence substantially identical (e.g., having at least 70%, 75%, 80%, 85%, 90%, 92%, 95%, 97%, 98%, or 99% sequence identity) thereto; or a nucleotide sequence having at least one, two, three, four, five, six, or seven modifications, but no more than ten modifications of SEQ ID NO: 1847;
[0597] (vi) a third spacer sequence comprising the nucleotide sequence of GATAGTTA, or a nucleotide sequence having at least one, two, or three modifications, but no more than four modifications of GATAGTTA; and
[0598] (vii) a fourth encoded miR183 binding site comprising the nucleotide sequence of SEQ ID NO: 1847, or a nucleotide sequence substantially identical (e.g., having at least 70%, 75%, 80%, 85%, 90%, 92%, 95%, 97%, 98%, or 99% sequence identity) thereto; or a nucleotide sequence having at least one, two, three, four, five, six, or seven modifications, but no more than ten modifications of SEQ ID NO: 1847.
   472. The viral genome of any one of embodiments 374-471, or the AAV particle of any one of embodiments 419-471, wherein the viral genome comprises a miR183 binding site series, which comprises four copies of a miR183 binding site, wherein each copy of the miR binding site in the series is separated by a spacer.
   473. The viral genome or AAV particle of embodiment 472, wherein the encoded miR183 binding site series comprises the nucleotide sequence of SEQ ID NO: 1849, or a nucleotide sequence at least 95% identical thereto.
   474. The viral genome of any one of embodiments 374-473, or the AAV particle of any one of embodiments 419-473, wherein the viral genome is self-complementary.
   475. The viral genome of any one of embodiments 274-473, or the AAV particle of any one of embodiments 419-473, wherein the viral genome is single-stranded.
   476. An isolated, e.g., recombinant, viral genome comprising in 5′ to 3′ order:
[0599] (i) a 5′ adeno-associated (AAV) ITR, optionally wherein the 5′ AAV ITR comprises the nucleotide sequence of SEQ ID NO: 1829, or a nucleotide sequence at least 95% identical thereto;
[0600] (ii) a CMVie enhancer, optionally wherein the CMVie enhancer comprises the nucleotide sequence of SEQ ID NO: 1831, or a nucleotide sequence at least 95% identical thereto;
[0601] (iii) a CB promoter or functional variant thereof, optionally wherein the CB promoter or functional variant thereof comprises the nucleotide sequence of SEQ ID NO: 1834, or a nucleotide sequence at least 95% identical thereto;
[0602] (iv) an intron, optionally wherein the intron comprises the nucleotide sequence of SEQ ID NO: 1842, or a nucleotide sequence at least 95% identical thereto;
[0603] (v) a nucleotide sequence encoding a signal sequence, optionally wherein the nucleotide sequence encoding the signal sequence comprises the nucleotide sequence of SEQ ID NO: 1850, or a nucleotide sequence at least 95% identical thereto;
[0604] (vi) a transgene encoding a GBA protein, wherein the nucleotide sequence encoding the GBA protein comprises the nucleotide sequence of SEQ ID NO: 1773 or a nucleotide sequence at least 88% (e.g., at least 89, 90, 92, 95, 96, 97, 98, or 99%) identical to the nucleotide sequence of SEQ ID NO: 1773;
[0605] (vii) a polyA signal region, optionally wherein the polyA signal region comprises the nucleotide sequence of SEQ ID NO: 1846, or a nucleotide sequence at least 95% identical thereto; and (viii) a 3′ AAV ITR, optionally wherein the 3′ AAV ITR comprises the nucleotide sequence of SEQ ID NO: 1830, or a nucleotide sequence at least 95% identical thereto.
   477. An isolated, e.g., recombinant, viral genome comprising in 5′ to 3′ order:
[0606] (i) a 5′ adeno-associated (AAV) ITR, optionally wherein the 5′ AAV ITR comprises the nucleotide sequence of SEQ ID NO: 1829, or a nucleotide sequence at least 95% identical thereto;
[0607] (ii) a CMVie enhancer, optionally wherein the CMVie enhancer comprises the nucleotide sequence of SEQ ID NO: 1831, or a nucleotide sequence at least 95% identical thereto;
[0608] (iii) a CB promoter or functional variant thereof, optionally wherein the CB promoter or functional variant thereof comprises the nucleotide sequence of SEQ ID NO: 1834, or a nucleotide sequence at least 95% identical thereto;
[0609] (iv) an intron, optionally wherein the intron comprises the nucleotide sequence of SEQ ID NO: 1842, or a nucleotide sequence at least 95% identical thereto;
[0610] (v) a nucleotide sequence encoding a signal sequence, optionally wherein the nucleotide sequence encoding the signal sequence comprises the nucleotide sequence of SEQ ID NO: 1850, or a nucleotide sequence at least 95% identical thereto;
[0611] (vi) a transgene encoding a GBA protein, optionally wherein the nucleotide sequence encoding the GBA protein comprises the nucleotide sequence of SEQ ID NO: 1773 or a nucleotide sequence at least 88% (e.g., at least 89, 90, 92, 95, 96, 97, 98, or 99%) identical to the nucleotide sequence of SEQ ID NO: 1773;
[0612] (vii) an encoded miR183 binding site, optionally wherein the encoded miR183 binding site comprises the nucleotide sequence of SEQ ID NO: 1847, or a nucleotide sequence having at least one, two, three, four, five, six, or seven modifications, but no more than ten modifications of SEQ ID NO: 1847;
[0613] (viii) a spacer sequence, optionally wherein the spacer comprises the nucleotide sequence of GATAGTTA, or a nucleotide sequence having at least one, two, or three modifications, but no more than four modifications of GATAGTTA;
[0614] (ix) an encoded miR183 binding site, optionally wherein the encoded miR183 binding site comprises the nucleotide sequence of SEQ ID NO: 1847, or a nucleotide sequence having at least one, two, three, four, five, six, or seven modifications, but no more than ten modifications of SEQ ID NO: 1847;
[0615] (x) a spacer sequence, optionally wherein the spacer comprises the nucleotide sequence of GATAGTTA, or a nucleotide sequence having at least one, two, or three modifications, but no more than four modifications of GATAGTTA;
[0616] (xi) an encoded miR183 binding site, optionally wherein the encoded miR183 binding site comprises the nucleotide sequence of SEQ ID NO: 1847, or a nucleotide sequence having at least one, two, three, four, five, six, or seven modifications, but no more than ten modifications of SEQ ID NO: 1847;
[0617] (xii) a spacer sequence, optionally wherein the spacer comprises the nucleotide sequence of GATAGTTA, or a nucleotide sequence having at least one, two, or three modifications, but no more than four modifications of GATAGTTA;
[0618] (xiii) an encoded miR183 binding site, optionally wherein the encoded miR183 binding site comprises the nucleotide sequence of SEQ ID NO: 1847, or a nucleotide sequence having at least one, two, three, four, five, six, or seven modifications, but no more than ten modifications of SEQ ID NO: 1847;
[0619] (xiv) a polyA signal region, optionally wherein the polyA signal region comprises the nucleotide sequence of SEQ ID NO: 1846, or a nucleotide sequence at least 95% identical thereto; and
[0620] (xv) a 3′ AAV ITR, optionally wherein the 3′ AAV ITR comprises the nucleotide sequence of SEQ ID NO: 1830, or a nucleotide sequence at least 95% identical thereto.
   478. The viral genome of any one of embodiments 417-477, or the AAV particle of any one of embodiments 419-475, which comprises the nucleotide sequence of SEQ ID NO: 1812, or a nucleotide sequence at least 95% identical thereto.
   479. The viral genome of any one of embodiments 417-478, or the AAV particle of any one of embodiments 419-475 or 478, which comprises the nucleotide sequence of SEQ ID NO: 1826, or a nucleotide sequence at least 95% identical thereto.
   480. An isolated, e.g., recombinant, viral genome comprising in 5′ to 3′ order:
[0621] (i) a 5′ adeno-associated (AAV) ITR, optionally wherein the 5′ AAV ITR comprises the nucleotide sequence of SEQ ID NO: 1829, or a nucleotide sequence at least 95% identical thereto;
[0622] (ii) a CMVie enhancer, optionally wherein the CMVie enhancer comprises the nucleotide sequence of SEQ ID NO: 1831, or a nucleotide sequence at least 95% identical thereto;
[0623] (iii) a CB promoter or functional variant thereof, optionally wherein the CB promoter or functional variant thereof comprises the nucleotide sequence of SEQ ID NO: 1834, or a nucleotide sequence at least 95% identical thereto;
[0624] (iv) an intron, optionally wherein the intron comprises the nucleotide sequence of SEQ ID NO: 1842, or a nucleotide sequence at least 95% identical thereto;
[0625] (v) a nucleic acid comprising a transgene encoding a β-glucocerebrosidase (GBA) protein of any one of embodiments 1-5, 172 or 175-215;
[0626] (vi) a polyA signal region, optionally wherein the polyA signal region comprises the nucleotide sequence of SEQ ID NO: 1846, or a nucleotide sequence at least 95% identical thereto; and
[0627] (vii) a 3′ AAV ITR, optionally wherein the 3′ AAV ITR comprises the nucleotide sequence of SEQ ID NO: 1830, or a nucleotide sequence at least 95% identical thereto.
   481. An isolated, e.g., recombinant, viral genome comprising in 5′ to 3′ order:
[0628] (i) a 5′ adeno-associated (AAV) ITR, optionally wherein the 5′ AAV ITR comprises the nucleotide sequence of SEQ ID NO: 1829, or a nucleotide sequence at least 95% identical thereto;
[0629] (ii) an EF-1α promoter or functional variant thereof, optionally wherein the EF-1α promoter or functional variant thereof comprises the nucleotide sequence of SEQ ID NO: 1839 or 1840, or a nucleotide sequence at least 95% identical thereto;
[0630] (iii) a nucleic acid comprising a transgene encoding a β-glucocerebrosidase (GBA) protein of any one of embodiments 1-5, 172 or 175-215;
[0631] (iv) a polyA signal region, optionally wherein the polyA signal region comprises the nucleotide sequence of SEQ ID NO: 1846, or a nucleotide sequence at least 95% identical thereto; and
[0632] (v) a 3′ AAV ITR, optionally wherein the 3′ AAV ITR comprises the nucleotide sequence of SEQ ID NO: 1830, or a nucleotide sequence at least 95% identical thereto.
   482. An isolated, e.g., recombinant, viral genome comprising in 5′ to 3′ order:
[0633] (i) a 5′ adeno-associated (AAV) ITR, optionally wherein the 5′ AAV ITR comprises the nucleotide sequence of SEQ ID NO: 1829, or a nucleotide sequence at least 95% identical thereto;
[0634] (ii) a CMVie enhancer, optionally wherein the CMVie enhancer comprises the nucleotide sequence of SEQ ID NO: 1831, or a nucleotide sequence at least 95% identical thereto;
[0635] (iii) a CMV promoter or functional variant thereof, optionally wherein the CMV promoter or functional variant thereof comprises the nucleotide sequence of SEQ ID NO: 1832, or a nucleotide sequence at least 95% identical thereto;
[0636] (iv) an intron, optionally wherein the intron comprises the nucleotide sequence of SEQ ID NO: 1842, or a nucleotide sequence at least 95% identical thereto;
[0637] (v) a nucleic acid comprising a transgene encoding a β-glucocerebrosidase (GBA) protein of any one of embodiments 1-5, 172 or 175-215;
[0638] (vi) a polyA signal region, optionally wherein the polyA signal region comprises the nucleotide sequence of SEQ ID NO: 1846, or a nucleotide sequence at least 95% identical thereto; and
[0639] (vii) a 3′ AAV ITR, optionally wherein the 3′ AAV ITR comprises the nucleotide sequence of SEQ ID NO: 1830, or a nucleotide sequence at least 95% identical thereto.
   483. An isolated, e.g., recombinant, viral genome comprising in 5′ to 3′ order:
[0640] (i) a 5′ adeno-associated (AAV) ITR, optionally wherein the 5′ AAV ITR comprises the nucleotide sequence of SEQ ID NO: 1829, or a nucleotide sequence at least 95% identical thereto;
[0641] (ii) an CAG promoter or functional variant thereof, optionally wherein the CAG promoter or functional variant thereof comprises the nucleotide sequence of SEQ ID NO: 1835, or a nucleotide sequence at least 95% identical thereto;
[0642] (iii) a nucleic acid comprising a transgene encoding a β-glucocerebrosidase (GBA) protein of any one of embodiments 1-5, 172 or 175-215;
[0643] (iv) a polyA signal region, optionally wherein the polyA signal region comprises the nucleotide sequence of SEQ ID NO: 1846, or a nucleotide sequence at least 95% identical thereto; and
[0644] (v) a 3′ AAV ITR, optionally wherein the 3′ AAV ITR comprises the nucleotide sequence of SEQ ID NO: 1830, or a nucleotide sequence at least 95% identical thereto.
   484. The viral genome of any one of embodiments 374-475 or 480-483, or the AAV particle of any one of embodiments 419-475, which comprises the nucleotide sequence of any one of SEQ ID NOs: 1759-1771, 1809-1811, 1813-1827, or 1870, or a nucleotide sequence at least 95% identical thereto.
   485. The viral genome of any one of embodiments 374-484, or the AAV particle of any one of embodiments 419-475, 478, 479, or 484, which further comprises a nucleic acid encoding a capsid protein, e.g., a structural protein, wherein the capsid protein comprises a VP1 polypeptide, a VP2 polypeptide, and/or a VP3 polypeptide.
   486. The viral genome or AAV particle of embodiment 485, wherein the VP1 polypeptide, the VP2 polypeptide, and/or the VP3 polypeptide are encoded by at least one Cap gene.
   487. The viral genome of any one of embodiments 374-486, or the AAV particle of any one of embodiments 419-475, 478, 479, 485, or 486, which further comprises a nucleic acid encoding a Rep protein, e.g., a non-structural protein, wherein the Rep protein comprises a Rep78 protein, a Rep68, Rep52 protein, and/or a Rep40 protein.
   488. The viral genome or AAV particle of embodiment 487, wherein the Rep78 protein, the Rep68 protein, the Rep52 protein, and/or the Rep40 protein are encoded by at least one Rep gene.
   489. An isolated, e.g., recombinant GBA protein encoded by the isolated nucleic acid of any one of embodiments 1-5, 373 or 376-416, or the viral genome of any one of embodiments 274-488.
   490. An isolated, e.g., recombinant, AAV particle comprising:
[0645] (i) a capsid protein; and
[0646] (ii) the viral genome of any one of embodiments 373-488.
   491. The AAV particle of embodiment 490, wherein:
[0647] (i) the capsid protein comprises the amino acid sequence of SEQ ID NO: 138, or an amino acid sequence with at least 80% (e.g., at least about 85, 90, 95, 96, 97, 98, or 99%) sequence identity thereto;
[0648] (ii) the capsid protein comprises an amino acid sequence having at least one, two or three modifications but not more than 30, 20 or 10 modifications of the amino acid sequence of SEQ ID NO: 138;
[0649] (iii) the capsid protein comprises the amino acid sequence of SEQ ID NO: 11, or an amino acid sequence with at least 80% (e.g., at least about 85, 90, 95, 96, 97, 98, or 99%) sequence identity thereto;
[0650] (iv) the capsid protein comprises an amino acid sequence having at least one, two or three modifications but not more than 30, 20 or 10 modifications of the amino acid sequence of SEQ ID NO: 11;
[0651] (v) the capsid protein comprises an amino acid sequence encoded by the nucleotide sequence of SEQ ID NO: 137, or a sequence with at least 80% (e.g., at least about 85, 90, 95, 96, 97, 98, or 990) sequence identity thereto; and/or
[0652] (vi) the nucleotide sequence encoding the capsid protein comprises the nucleotide sequence of SEQ ID NO: 137, or a sequence with at least 80% (e.g., at least about 85, 90, 95, 96, 97, 98, or 990) sequence identity thereto.
   492. The AAV particle of embodiment 490 or 491, wherein the capsid protein comprises:
[0653] (i) an amino acid substitution at position K449, e.g., a K449R substitution, numbered according to SEQ ID NO:138;
[0654] (ii) an insert comprising the amino acid sequence of TLAVPFK (SEQ ID NO: 1262), optionally wherein the insert is present immediately subsequent to position 588, relative to a reference sequence numbered according to SEQ ID NO:138;
[0655] (iii) an amino acid other than “A” at position 587 and/or an amino acid other than “Q” at position 588, numbered according to SEQ ID NO: 138;
[0656] (iv) the amino acid substitution of A587D and/or Q588G, numbered according to SEQ ID NO:138.
   493. The AAV particle of any one of embodiments 490-492, wherein the capsid protein comprises (i) the amino acid substitution of K449R numbered according to SEQ ID NO:138; and (ii) an insert comprising the amino acid sequence of TLAVPFK (SEQ ID NO: 1262), optionally wherein the insert is present immediately subsequent to position 588 of SEQ ID NO:138.
   494. The AAV particle of any one of embodiments 490-492, wherein the capsid protein comprises (i) the amino acid substitution of K449R numbered according to SEQ ID NO:138; (ii) an insert comprising the amino acid sequence of TLAVPFK (SEQ ID NO: 1262), optionally wherein the insert is present immediately subsequent to position 588, relative to a reference sequence numbered according to SEQ ID NO:138; and (iii) the amino acid substitutions of A587D and Q588G, numbered according to SEQ ID NO:138.
   495. The AAV particle of any one of embodiments 490-492, wherein the capsid protein comprises (i) an insert comprising the amino acid sequence of TLAVPFK (SEQ ID NO: 1262), optionally wherein the insert is present immediately subsequent to position 588, relative to a reference sequence numbered according to SEQ ID NO:138; and (ii) the amino acid substitutions of A587D and Q588G, numbered according to SEQ ID NO:138.
   496. The AAV particle of any one of embodiments 490-495, wherein the capsid protein comprises any of the capsid proteins listed in Table 1 or a functional variant thereof.
   497. The AAV particle of any one of embodiments 490-496, wherein the capsid protein comprises a VOYl01, VOY201, AAVPHP.N (PHP.N), AAVPHP.B (PHP.B), AAVPHP.A (PHP.A), PHP.B2, PHP.B3, G2B4, G2B5, AAV9, AAVrh10, or a functional variant thereof.
   498. The AAV particle of any one of embodiments 490-497, wherein:
[0657] (i) the capsid protein comprises the amino acid sequence of SEQ ID NO: 1, or an amino acid sequence substantially identical (e.g., having at least 70%, 75%, 80%, 85%, 90%, 92%, 95%, 97%, 98%, or 99% sequence identity) thereto;
[0658] (ii) the capsid protein comprises an amino acid sequence comprising at least one, two, or three modifications but no more than 30, 20, or 10 modifications, e.g., substitutions, relative to the amino acid sequence of SEQ ID NO: 1;
[0659] (iii) the capsid protein comprises an amino acid sequence encoded by the nucleotide sequence of SEQ ID NO: 2 or a nucleotide sequence substantially identical (e.g., having at least 70%, 75%, 80%, 85%, 90%, 92%, 95%, 97%, 98%, or 99% sequence identity) thereto; and/or
[0660] (iv) the nucleotide sequence encoding the capsid protein comprises the nucleotide sequence of SEQ ID NO: 2, or a nucleotide sequence substantially identical (e.g., having at least 70%, 75%, 80%, 85%, 90%, 92%, 95%, 97%, 98%, or 99% sequence identity) thereto.
   499. The AAV particle of any one of embodiments 490-498, wherein the capsid protein comprises:
[0661] (i) a VP1 polypeptide, VP2 polypeptide, VP3 polypeptide, or a combination thereof;
[0662] (ii) the amino acid sequence corresponding to positions 138-743, e.g., a VP2, of SEQ ID NO: 1, or a sequence with at least 80% (e.g., at least about 85, 90, 92, 95, 96, 97, 98, or 99%) sequence identity thereto;
[0663] (iii) the amino acid sequence corresponding to positions 203-743, e.g., a VP3, of SEQ ID NO: 1, or a sequence with at least 80% (e.g., at least about 85, 90, 92, 95, 96, 97, 98, or 99%) sequence identity thereto; and/or
[0664] (iv) the amino acid sequence corresponding to positions 1-743, e.g., a VP1, of SEQ ID NO: 1, or a sequence with at least 80% (e.g., at least about 85, 90, 92, 95, 96, 97, 98, or 99%) sequence identity thereto.
   500. The AAV particle of any one of embodiments 490-499, wherein the nucleotide sequence encoding the capsid protein comprises:
[0665] (i) a CTG initiation codon; and/or
[0666] (ii) the nucleotide sequence of SEQ ID NO: 137 which comprises 3-20 mutations, e.g., substitutions, e.g., 3-15 mutations, 3-10 mutations, 3-5 mutations, 5-20 mutations, 5-15 mutations, 5-10 mutations, 10-20 mutations, 10-15 mutations, 15-20 mutations, 3 mutations, 5 mutations, 10 mutations, 12 mutations, 15 mutations, 18 mutations, or 20 mutations.
   501. A vector comprising the isolated nucleic acid of any one of embodiments 1-5, 373 or 376-416, or the viral genome of any one of embodiments 374-488.
   502. A cell comprising the viral genome of any one of embodiments 274-488, the viral particle of any one of embodiments 490-500, or the vector of embodiment 501.
   503. The cell of embodiment 502, which a mammalian cell, e.g., an HEK293 cell, an insect cell, e.g., an Sf9 cell, or a bacterial cell.
   504. A nucleic acid comprising the viral genome of any one of embodiments 374-488, and a backbone region suitable for replication of the viral genome in a cell, e.g., a bacterial cell (e.g., wherein the backbone region comprises one or both of a bacterial origin of replication and a selectable marker).
   505. The nucleic acid of embodiment 504, wherein the viral genome comprises a nucleotide sequence of any one of SEQ ID NOs: 1799-1082, 1752-1759, 1803-1821, or 1824-1830.
   506. A method of making a viral genome, the method comprising:
[0667] (i) providing the nucleic acid molecule comprising the viral genome embodiment 504 or 505, or a nucleic acid encoding the viral genome of any one of embodiments 374-488; and
[0668] (ii) excising the viral genome from the backbone region, e.g., by cleaving the nucleic acid molecule at upstream and downstream of the viral genome.
   507. A method of making an isolated, e.g., recombinant, AAV particle, the method comprising
[0669] (i) providing a host cell comprising the viral genome of any one of embodiments 374-488 or the nucleic acid encoding the viral genome of embodiment 504 or 505; and
[0670] (ii) incubating the host cell under conditions suitable to enclose the viral genome in a capsid protein thereby making the isolated AAV particle.
   508. The method of embodiment 507, further comprising, prior to step (i), introducing a first nucleic acid molecule comprising the viral genome into the host cell.
   509. The method of embodiment 507 or 508, wherein the host cell comprises a second nucleic acid encoding a capsid protein.
   510. The method of embodiment 509, further comprising introducing the second nucleic acid into the cell.
   511. The method of embodiment 509 or 510, wherein the second nucleic acid molecule is introduced into the host cell prior to, concurrently with, or after the first nucleic acid molecule.
   512. The method of any one of embodiments 507-511, wherein the host cell comprises a mammalian cell, e.g., an HEK293 cell, an insect cell, e.g., an Sf9 cell, or a bacterial cell.
   513. A pharmaceutical composition comprising the AAV particle of any one of embodiments 15-372, 375-415, 419-475, 478, 479, 484-488, or 490-500, or an AAV particle comprising the viral genome of any one of embodiments 374-488, and a pharmaceutically acceptable excipient.
   514. A method of delivering an exogenous GBA protein to a subject, comprising administering an effective amount of the pharmaceutical composition of embodiment 513, the AAV particle of any one of embodiments 6-372, 375-415, 419-475, 478-479, 484-488, or 490-500, an AAV particle comprising the viral genome of any one of embodiments 374-488, or an AAV particle comprising a viral genome comprising the nucleic acid of any one of embodiments 1-5, 373, or 376-415, thereby delivering the exogenous GBA to the subject.
   515. The method of embodiment 514, wherein the subject has, has been diagnosed with having, or is at risk of having a disease associated with expression of GBA, e.g., aberrant or reduced GBA expression, e.g., expression of an GBA gene, GBA mRNA, and/or GBA protein.
   516. The method of embodiment 514 or 515, wherein the subject has, has been diagnosed with having, or is at risk of having a neurodegenerative or neuromuscular disorder.
   517. A method of treating a subject having or diagnosed with having a disease associated with GBA expression comprising administering an effective amount of the pharmaceutical composition of embodiment 513, the AAV particle of any one of embodiments 6-372, 375-415, 419-475, 478-479, 484-488, or 490-500, an AAV particle comprising the viral genome of any one of embodiments 374-488, or an AAV particle comprising a viral genome comprising the nucleic acid of any one of embodiments 1-5, 373, or 376-415, thereby treating the disease associated with GBA expression in the subject.
   518. A method of treating a subject having or diagnosed with having a neurodegenerative or neuromuscular disorder, comprising administering an effective amount of the pharmaceutical composition of embodiment 513, the AAV particle of any one of embodiments 6-372, 375-415, 419-475, 478-479, 484-488, or 490-500, an AAV particle comprising the viral genome of any one of embodiments 374-488, or an AAV particle comprising a viral genome comprising the nucleic acid of any one of embodiments 1-5, 373, or 376-415, thereby treating the neurodegenerative or neuromuscular disorder in the subject.
   519. The method of any one of embodiments 515-518, wherein the disease associated with expression of GBA or the neurodegenerative or neuromuscular disorder comprises Parkinson's Disease (PD), dementia with Lewy Bodies (DLB), Gaucher disease (GD), Spinal muscular atrophy (SMA), Multiple System Atrophy (MSA), or Multiple sclerosis (MS).
   520. A method of treating a subject having or diagnosed with having Parkinson's Disease (PD) (e.g., PD associated with a mutation in a GBA gene) comprising administering an effective amount of the pharmaceutical composition of embodiment 513, the AAV particle of any one of embodiments 6-372, 375-415, 419-475, 478-479, 484-488, or 490-500, an AAV particle comprising the viral genome of any one of embodiments 374-488, or an AAV particle comprising a viral genome comprising the nucleic acid of any one of embodiments 1-5, 373, or 376-415, thereby treating PD in the subject.
   521. The method of embodiment 519 or 520, wherein the PD is associated with a mutation in a GBA gene.
   522. The method of any one of embodiments 519-521, wherein the PD is an early onset PD (e.g., before 50 years of age) or a juvenile PD (e.g., before 20 years of age).
   523. The method of embodiment 519-522, wherein the PD is a tremor dominant, postural instability gait difficulty PD (PIGD) or a sporadic PD (e.g., a PD not associated with a mutation).
   524. A method of treating a subject having or diagnosed with having Gaucher Disease (GD) comprising administering an effective amount of the pharmaceutical composition of embodiment 513, the AAV particle of any one of embodiments 6-372, 375-415, 419-475, 478-479, 484-488, or 490-500, an AAV particle comprising the viral genome of any one of embodiments 374-488, or an AAV particle comprising a viral genome comprising the nucleic acid of any one of embodiments 1-5, 373, or 376-415, thereby treating GD in the subject.
   525. The method of embodiment 519 or 524, wherein the GD is neuronopathic GD (e.g., affect a cell or tissue of the CNS, e.g., a cell or tissue of the brain and/or spinal cord), non-neuronopathic GD (e.g., does not affect a cell or tissue of the CNS), or combination thereof.
   526. The method of any one of embodiments 519, 525, or 526, wherein the GD is Type I GD (GD1), Type 2 GD (GD2), or Type 3 GD (GD3).
   527. The method of embodiment 526, wherein the GD1 is non-neuronopathic GD.
   528. The method of embodiment 526, wherein the GD2 is a neuronopathic GD.
   529. The method of any one of embodiments 514-528, wherein the subject has a reduced level of GCase activity as compared to a reference level, when measured by an assay, e.g., an assay as described in Example 7.
   530. The method of embodiment 529, wherein the reference level comprises the level of GCase activity in a subject that does not have a disease associated with GBA expression, a neuromuscular and/or a neurodegenerative disorder.
   531. The method of any one of embodiments 517-530, wherein treating comprises prevention of progression of the disease in the subject.
   532. The method of any one of embodiments 517-531, wherein treating results in amelioration of at least one symptom of the disease associated with GBA expression, the neurodegenerative disorder, and/or the neuromuscular disorder in the subject.
   533. The method of embodiment 532, wherein the symptom of the disease associated with GBA expression, the neurodegenerative disorder, and/or the neuromuscular disorder comprises reduced GCase activity, accumulation of glucocerebroside and other glycolipids, e.g., within immune cells (e.g., macrophages), build-up of synuclein aggregates (e.g., Lewy bodies), developmental delay, progressive encephalopathy, progressive dementia, ataxia, myoclonus, oculomotor dysfunction, bulbar palsy, generalized weakness, trembling of a limb, depression, visual hallucinations, cognitive decline, or a combination thereof.
   534. The method of any one of embodiments 514-533, wherein the subject is a human.
   535. The method of any one of embodiments 514-534, wherein the subject is a juvenile, e.g., between 6 years of age to 20 years of age.
   536. The method of any one of embodiments 514-535, wherein the subject is an adult, e.g., above 20 years of age.
   537. The method of any one of embodiments 514-536, wherein the subject has a mutation in a GBA gene, GBA mRNA, and/or GBA protein.
   538. The method of any one of embodiments 514-537, wherein the AAV particle is administered to the subject intravenously, intracerebrally, via intrathalamic (ITH) administration, intramuscularly, intrathecally, intracerebroventricularly, via intraparenchymal administration, via focused ultrasound (FUS), e.g., coupled with the intravenous administration of microbubbles (FUS-MB), or MRI-guided FUS coupled with intravenous administration, or via intra-cisterna magna injection (ICM).
   539. The method of any one of embodiments 514-538, wherein the AAV particle is administered via dual ITH and ICM administration.
   540. The method of any one of embodiments 514-538, wherein the AAV particle is administered via intravenous injection, optionally wherein the intravenous injection is via focused ultrasound (FUS), e.g., coupled with the intravenous administration of microbubbles (FUS-MB), or MRI-guided FUS coupled with intravenous administration.
   541. The method of any one of embodiments 514-540, wherein the AAV particle is administered to a cell, tissue, or region of the CNS, e.g., a region of the brain or spinal cord, e.g., the parenchyma, the cortex, substantia nigra, caudate cerebellum, striatum, corpus callosum, cerebellum, brain stem caudate-putamen, thalamus, superior colliculus, the spinal cord, or a combination thereof.
   542. The method of any one of embodiments 514-541, wherein the AAV particle is administered to a cell, tissue, or region of the periphery, e.g., a lung cell or tissue, a heart cell or tissue, a spleen cell or tissue, a liver cell or tissue, or a combination thereof.
   543. The method of any one of embodiments 514-542, wherein the AAV particle is administered to the cerebral spinal fluid, the serum, or a combination thereof.
   544. The method of any one of embodiments 514-543, wherein the AAV particle is administered to at least two tissues, or regions of the CNS, e.g., bilateral administration.
   545. The method of any one of embodiments 514-544, further comprising performing a blood test, performing an imaging test, collecting a CNS biopsy sample, collecting a tissue biopsy, (e.g., a biopsy of the lung, liver, or spleen), collecting a blood or serum sample, or collecting an aqueous cerebral spinal fluid biopsy.
   546. The method of any one of embodiments 514-545, which further comprises evaluating, e.g., measuring, the level of GBA expression, e.g., GBA gene, GBA mRNA, and/or GBA protein expression, in the subject, e.g., in a cell, tissue, or fluid, of the subject, optionally wherein the level of GBA protein is measured by an assay described herein, e.g., an ELISA, a Western blot, or an immunohistochemistry assay.
   547. The method of embodiment 546, wherein measuring the level of GBA expression is performed prior to, during, or subsequent to treatment with the AAV particle.
   548. The method of embodiment 546 or 547, wherein the cell or tissue is a cell or tissue of the central nervous system (e.g., parenchyma) or a peripheral cell or tissue (e.g., the liver, heart, and/or spleen).
   549. The method of any one of embodiments 514-548, wherein the administration results in increased level of GBA protein expression in a cell or tissue of the subject, relative to reference level, e.g., a subject that has not received treatment, e.g., has not been administered the AAV particle.
   550. The method of any one of embodiments 514-549, which further comprises evaluating, e.g., measuring, the level of GCase activity in the subject, e.g., in a cell or tissue of the subject, optionally wherein the level of GCase activity is measured by an assay described herein, e.g., assay as described in Example 7.
   551. The method of any one of embodiments 514-550, wherein the administration results in an increase in at least one, two, or all of:
[0671] (i) the level of GCase activity in a cell, tissue, (e.g., a cell or tissue of the CNS, e.g., the cortex, striatum, thalamus, cerebellum, and/or brainstem), and/or fluid (e.g., CSF and/or serum), of the subject, optionally wherein the level of GCase activity is increased by at least 3, 4, 4.5, 4.6, 4.7, 4.8, 4.9, 5, 5.1, 5.2, 5.3, 5.4, or 5.5 fold, as compared to a reference level, e.g., a subject that has not received treatment, e.g., has not been administered the AAV particle;
[0672] (ii) the level of viral genomes (VG) per cell in a CNS tissue (e.g., the cortex, striatum, thalamus, cerebellum, brainstem, and/or spinal cord) of the subject, optionally wherein the VG level is increased by greater than 50 VGs per cell, as compared to a peripheral tissue, wherein the level of VGs per cell is at least 4-10 fold lower than the levels in the CNS tissue, e.g., as measured by an assay as described herein; and/or
[0673] (iii) the level of GBA mRNA expression in a cell or tissue (e.g. a cell or tissue of the CNS, e.g., the cortex, thalamus, and/or brainstem), optionally wherein the level of GBA mRNA is increased by at least 100-1300 fold, e.g., 100 fold, 200 fold, 500 fold, 600 fold, 850 fold, 900 fold, 950 fold, 1000 fold, 1050 fold, 1100 fold, 1150 fold, 1200 fold, 1250 fold, or 1300 fold as compared to a reference level, e.g., a subject that has not received treatment (e.g., has not been administered the AAV particle), or endogenous GBA mRNA levels, e.g., as measured by an assay as described herein.
   552. The method of any one of embodiments 514-551, wherein further comprising administration of an additional therapeutic agent and/or therapy suitable for treatment or prevention of the disease associated GBA expression, the neurodegenerative disorder, and/or the neuromuscular disorder.
   553. The method of embodiment 552, wherein the additional therapeutic agent comprises enzyme replacement therapy (ERT) (e.g., imiglucerase, velaglucerase alfa, or taliglucerase alfa); substrate reduction therapy (SRT) (e.g., eliglustat or miglustat), blood transfusion, levodopa, carbidopa, Safinamide, dopamine agonists (e.g., pramipexole, rotigotine, or ropinirole), anticholinergics (e.g., benztropine or trihexyphenidyl), cholinesterase inhibitors (e.g., rivastigmine, donepezil, or galantamine), an N-methyl-d-aspartate (NMDA) receptor antagonist (e.g., memantine), or a combination thereof.
   554. The pharmaceutical composition of embodiment 513, the AAV particle of any one of embodiments 6-372, 375-415, 419-475, 478-479, 484-488, or 490-500, an AAV particle comprising the viral genome of any one of embodiments 374-488, or an AAV particle comprising a viral genome comprising the nucleic acid of any one of embodiments 1-5, 373, or 376-415, for use in the manufacture of a medicament.
   555. The pharmaceutical composition of embodiment 513, the AAV particle of any one of embodiments 6-372, 375-415, 419-475, 478-479, 484-488, or 490-500, an AAV particle comprising the viral genome of any one of embodiments 374-488, or an AAV particle comprising a viral genome comprising the nucleic acid of any one of embodiments 1-5, 373, or 376-415, for use in the treatment of a disease associated with GBA expression, a neuromuscular and/or a neurodegenerative disorder.
   556. Use of the pharmaceutical composition of embodiment 513, the AAV particle of any one of embodiments 6-372, 375-415, 419-475, 478-479, 484-488, or 490-500, an AAV particle comprising the viral genome of any one of embodiments 374-488, or an AAV particle comprising a viral genome comprising the nucleic acid of any one of embodiments 1-5, 373, or 376-415, in the manufacture of a medicament for the treatment of a disease associated with GBA expression, a neuromuscular and/or a neurodegenerative disorder.
   557. Use of the pharmaceutical composition of embodiment 513, the AAV particle of any one of embodiments 6-372, 375-415, 419-475, 478-479, 484-488, or 490-500, an AAV particle comprising the viral genome of any one of embodiments 374-488, or an AAV particle comprising a viral genome comprising the nucleic acid of any one of embodiments 1-5, 373, or 376-415, in the manufacture of a medicament.

[0674] The details of various aspects or embodiments of the present disclosure are set forth below. Other features, objects, and advantages of the disclosure will be apparent from the description and the claims. In the description, the singular forms also include the plural unless the context clearly dictates otherwise. Unless defined otherwise, all technical and scientific terms used herein have the same meaning as commonly understood by one of ordinary skill in the art in the field of this disclosure. In the case of conflict, the present description will control.

### BRIEF DESCRIPTION OF THE DRAWINGS

[0675] FIGS. 1A-1B depict LC-MS/MS results quantifying levels of GBA substrate glucosylsphingosine (GlcSph) in cell lysates of Gaucher disease patient derived fibroblasts (GD1 patient GM04394, GD1 Patient GM00852, and GD2 patient GM00877) and healthy control fibroblasts (CLT GM05758, CTL GM02937 and CTL GM08402). Data are shown as GlcSph normalized to actin (FIG. 1A) or normalized to lysosomal protein Lamp1 (FIG. 1B). FIG. 1C depicts GBA protein levels detected in lysates of Gaucher patient-derived fibroblasts (GD1 and GD2) compared to healthy control fibroblast (HC) by LC-MS/MS. Data are shown as concentration of GBA protein (ng) relative to total protein (mg).

[0676] FIGS. 2A-2B depict GCase activity (RFU/mL normalized to mg of protein) in GD-II GM00877 fibroblast cell pellets (FIG. 2A) or conditioned media (FIG. 2B) at Day 7 after transduction with AAV2 viral particles comprising the viral genome construct on the X-axis from left to right: GBA_VG1 (SEQ ID NO: 1759), GBA_VG9 (SEQ ID NO: 1767), GBA_VG10 (SEQ ID NO: 1768), GBA_VG11 (SEQ ID NO: 1769), GBA_VG6 (SEQ ID NO: 1764), GBA_VG7 (SEQ ID NO: 1765), GBA_VG12 (SEQ ID NO: 1770), GBA_VG3 (SEQ ID NO: 1761), GBA_VG4 (SEQ ID NO: 1762), GBA_VG5 (SEQ ID NO: 1763), and GBA_VG13 (SEQ ID NO: 1771), at MOI of 10^{3.5}. The dotted line indicates the baseline level (vehicle treatment).

[0677] FIG. 3 depicts levels of GBA substrate glucosylsphingosine (GlcSph) in the cell lysates (ng/mg Lamp1) collected from GD-II patient fibroblasts (GM00877) at Day 7 after transduction with transduction of a no AAV control or AAV2 vectors comprising the viral genome indicated on the X-axis (from left to right: GBA_VG1 (SEQ ID NO: 1759), GBA_VG9 (SEQ ID NO: 1767), GBA_VG6 (SEQ ID NO: 1764), GBA_VG7 (SEQ ID NO: 1765), GBA_VG3 (SEQ ID NO: 1761), GBA_VG4 (SEQ ID NO:, and GBA_VG5 (SEQ ID NO: 1763)).

[0678] FIG. 4A depicts GCase activity measured as RFU per mL normalized to mg of protein in GD-II patient fibroblasts (GD-II GM00877) on day 7 post-transduction with AAV2 vectors comprising the viral genome indicated on the X-axis (from left to right: GBA_VG1 (SEQ ID NO: 1759), GBA_VG14 (SEQ ID NO: 1809), GBA_VG15 (SEQ ID NO: 1810), GBA_VG16 (SEQ ID NO: 1811), GBA_VG17 (SEQ ID NO: 1812), GBA_VG18 (SEQ ID NO: 1813), GBA_VG19 (SEQ ID NO: 1814), and GBA_VG20 (SEQ ID NO: 1815)) at an MOI of 10^{2.5} (first bar), 10³ (second bar), 10^{3.5} and 10⁴ (third bar). FIG. 4B depicts the level of the GBA substrate glucosylsphingosine (GlcSph, ng/mg Lamp1) in the cell lysate from GD-II patient-derived fibroblasts at day 7 after transduction with AAV2 vectors comprising the viral genome indicated on the X-axis (from left to right: GBA_VG1 (SEQ ID NO: 1759), GBA_VG14 (SEQ ID NO: 1809), GBA_VG15 (SEQ ID NO: 1810), GBA_VG16 (SEQ ID NO: 1811), GBA_VG17 (SEQ ID NO: 1812), GBA_VG18 (SEQ ID NO: 1813), GBA_VG19 (SEQ ID NO: 1814), and GBA_VG20 (SEQ ID NO: 1815)) at an MOI of of 10^{2.5} (first bar), 10³ (second bar), 10^{3.5} and 10⁴ (third bar).

[0679] FIG. 5 depicts the GC content and distribution of a first codon-optimized nucleotide sequence encoding a GBA protein of SEQ ID NO: 1773, a second codon-optimized nucleotide sequence encoding a GBA protein of SEQ ID NO: 1781, and a wild-type nucleotide sequence encoding a GBA protein of SEQ ID NO: 1777.

[0680] FIGS. 6A-6B compare activity of a GBA protein expressed by AAV2 vectorized viral genome constructs: GBA_VG1 (SEQ ID NO: 1759), GBA_VG17 (SEQ ID NO: 1812), and GBA_VG21 (SEQ ID NO: 1816). FIG. 6A depicts the GCase activity (RFU/mL) normalized to mg of protein in GD-II patient fibroblasts treated with AAV2 viral particles at an MOI of 10^{4.5}, comprising the viral genome constructs indicated on the X-axis (GBA_VG1 (SEQ ID NO: 1759), GBA_VG17 (SEQ ID NO: 1812), and GBA_VG21 (SEQ ID NO: 1816)) compared to a no AAV control. FIG. 6B depicts glucosylsphingosine (GlcSph) (ng/mL Lamp1) in the cell lysate from GD-II patient fibroblasts treated with AAV2 viral particles comprising the viral genome constructs indicated on the X-axis (from left to right GBA_VG1 (SEQ ID NO: 1759), GBA_VG17 (SEQ ID NO: 1812), and GBA_VG21 (SEQ ID NO: 1816)) at an MOI of 10′, or a no AAV treatment control.

[0681] FIG. 7 depicts the GCase activity (RFU/mL) per mg of protein in rat embryonic dorsal root ganglion (DRG) neurons transduced an AAV2 vector comprising GBA_VG33 (SEQ ID NO: 1828) or an AAV2 vector comprising GBA_VG17 (SEQ ID NO: 1812) at an MOI of 10^{3.5} or 10^{4.5}, compared to a no AAV control.

[0682] FIG. 8 depicts the biodistribution (VG/cell) versus GCase activity (RFU/mL, fold over endogenous GCase activity, normalized to mg of protein) in the cortex, striatum, thalamus, brainstem, cerebellum, and liver in wild-type mice at one-month post-IV injection of VOY101.GBA_VG17 (SEQ ID NO: 1812) at 2e13 vg/kg.

[0683] FIG. 9A is a graph showing the percentage of transduced cells (% HA positive cells) in various brain regions of NHPs following intravenous administration of a dose of 6.7e12 VG/kg of AAV particles comprising the TTD-001 capsid variant. FIG. 9B is a graph showing the percentage of transduced cells (% HA positive cells) in various brain regions of NHPs following intravenous administration of a dose of 2e13 VG/kg of AAV particles comprising the TTD-001 capsid variant. FIG. 9C is a graph showing the percentage of neuronal transduction (% HA cells among SMI311+ cells) in the thalamus, dentate nucleus, and spinal cord of the NHPs following intravenous administration of a dose of 2e13 VG/kg of AAV particles comprising the TTD-001 capsid variant.

### DETAILED DESCRIPTION

[0684] Described herein, inter alia, are compositions comprising isolated, e.g., recombinant, viral particles, e.g., AAV particles, for delivery, e.g., vectorized delivery, of a protein, e.g., a GBA protein, and methods of making and using the same. Adeno-associated viruses (AAV) are small non-enveloped icosahedral capsid viruses of the Parvoviridae family characterized by a single stranded DNA viral genome. Parvoviridae family viruses consist of two subfamilies: Parvovirinae, which infect vertebrates, and Densovirinae, which infect invertebrates. The Parvoviridae family includes the Dependovirus genus which includes AAV, capable of replication in vertebrate hosts including, but not limited to, human, primate, bovine, canine, equine, and ovine species.

[0685] The parvoviruses and other members of the Parvoviridae family are generally described in Kenneth I. Berns, “Parvoviridae: The Viruses and Their Replication,” Chapter 69 in Fields Virology (3d Ed. 1996), the contents of which are incorporated by reference in their entirety.

[0686] AAV have proven to be useful as a biological tool due to their relatively simple structure, their ability to infect a wide range of cells (including quiescent and dividing cells) without integration into the host genome and without replicating, and their relatively benign immunogenic profile. The genome of the virus may be manipulated to contain a minimum of components for the assembly of a functional recombinant virus, or viral particle, which is loaded with or engineered to target a particular tissue and express or deliver a desired payload. The genome of the virus may be modified to contain a minimum of components for the assembly of a functional recombinant virus, or viral particle, which is loaded with or engineered to express or deliver a desired nucleic acid construct or payload, e.g., a transgene, polypeptide-encoding polynucleotide, e.g., a GBA protein, e.g., a GCase, GCase and PSAP, GCase and SapA, or GCase and SapC, GCase and a cell penetration peptide (e.g., an ApoEII peptide, a TAT peptide, or an ApoB peptide), or GCase and a lysosomal targeting sequence (LTS), which may be delivered to a target cell, tissue, or organism. In some embodiments, the target cell is a CNS cell. In some embodiments, the target tissue is a CNS tissue. The target CNS tissue may be brain tissue. In some embodiments, the brain target comprises caudate, putamen, thalamus, superior colliculus, cortex, and corpus collosum.

[0687] Gene therapy presents an alternative approach for PD and related diseases sharing single-gene etiology, such as Gaucher disease and Dementia with Lewy Bodies and related disorders. AAVs are commonly used in gene therapy approaches as a result of a number of advantageous features. Without wishing to be bound by theory, it is believed in some embodiments, that expression vectors, e.g., an adeno-associated viral vector (AAVs) or AAV particle, e.g., an AAV particle described herein, can be used to administer and/or deliver a GBA protein (e.g., GCase and related proteins), in order to achieve sustained, high concentrations, allowing for longer lasting efficacy, fewer dose treatments, broad biodistribution, and/or more consistent levels of the GBA protein, relative to a non-AAV therapy.

[0688] As demonstrated in the Examples herein below, the compositions and methods described herein provides improved features compared to prior enzyme replacement approaches, including (i) increased GCase activity in a cell, tissue, (e.g., a cell or tissue of the CNS, e.g., the cortex, striatum, thalamus, cerebellum, and/or brainstem), and/or fluid (e.g., CSF and/or serum), of the subject; (ii) increased biodistribution throughout the CNS (e.g., the cortex, striatum, thalamus, cerebellum, brainstem, and/or spinal cord), and the periphery (e.g., the liver), and/or (iii) elevated payload expression, e.g., GBA mRNA expression, in multiple brain regions (e.g., cortex, thalamus, and brain stem) and the periphery (e.g., the liver). In some embodiments, an AAV viral genome encoding a GBA protein described herein which comprise an optimized nucleotide sequence encoding the GBA protein (e.g., SEQ ID NO: 1773) result in high biodistribution in the CNS; increased GCase activity in the CNS, peripheral tissues, and/or fluid; and successful transgene transcription and expression. The compositions and methods described herein can be used in the treatment of disorders associated with a lack of a GBA protein and/or GCase activity, such as neuronopathic (affects the CNS) and non-neuronopathic (affects non-CNS) Gaucher's disease (e.g., Type 1 GD, Type 2 GD, or Type 3 GD), a PD associated with a mutation in a GBA gene, and a dementia with Lewy Bodies (DLB).

[0689] As demonstrated in the Examples herein below, certain AAV capsid variants described herein show multiple advantages over wild-type AAV9, including (i) increased penetrance through the blood brain barrier following intravenous administration, (ii) wider distribution throughout the multiple brain regions, e.g., frontal cortex, sensory cortex, motor cortex, putamen, thalamus, cerebellar cortex, dentate nucleus, caudate, and/or hippocampus, and/or (iii) elevated payload expression in multiple brain regions. Without wishing to be being bound by theory, it is believed that these advantages may be due, in part, to the dissemination of the AAV capsid variants through the brain vasculature. In some embodiments, the AAV capsids described herein enhance the delivery of a payload, e.g., lysosomal storage enzyme, e.g., a GBA protein described herein, to multiple regions of the brain including for example, the frontal cortex, sensory cortex, motor cortex, putamen, thalamus, cerebellar cortex, dentate nucleus, caudate, and/or hippocampus. In some embodiments, enhance the expression of a payload, e.g., a GBA protein described herein, to multiple cell types in the CNS, e.g., neurons, oligodendrocytes, and/or glial cells. Without wishing to be bound by theory, an AAV particle comprising an AAV capsid polypeptide, e.g., an AAV capsid variant described herein, for the vectorized delivery of a GBA protein described here will result in increased penetrance through the blood brain barrier, e.g., following intravenous administration, and/or increased biodistribution of the GBA protein in the central nervous system, e.g., the brain and the spinal cord.

### I. Compositions

### Adeno-Associated Viral (AAV) Vectors

[0690] AAV have a genome of about 5,000 nucleotides in length which contains two open reading frames encoding the proteins responsible for replication (Rep) and the structural protein of the capsid (Cap). The open reading frames are flanked by two Inverted Terminal Repeat (ITR) sequences, which serve as the origin of replication of the viral genome. The wild-type AAV viral genome comprises nucleotide sequences for two open reading frames, one for the four non-structural Rep proteins (Rep78, Rep68, Rep52, Rep40, encoded by Rep genes) and one for the three capsid, or structural, proteins (VP1, VP2, VP3, encoded by capsid genes or Cap genes). The Rep proteins are important for replication and packaging, while the capsid proteins are assembled to create the protein shell of the AAV, or AAV capsid. Alternative splicing and alternate initiation codons and promoters result in the generation of four different Rep proteins from a single open reading frame and the generation of three capsid proteins from a single open reading frame. Though it varies by AAV serotype, as a non-limiting example, for AAV9/hu.14 (SEQ ID NO: 123 of U.S. Pat. No. 7,906,111, the contents of which are herein incorporated by reference in their entirety) VP1 refers to amino acids 1-736, VP2 refers to amino acids 138-736, and VP3 refers to amino acids 203-736. As another non-limiting example, VP1 refers to amino acids 1-743 numbered according to SEQ ID NO: 1, VP2 refers to amino acids 138-743 numbered according to SEQ ID NO: 1, and VP3 refers to amino acids 203-743 numbered according to SEQ ID NO: 1. In other words, VP1 is the full-length capsid sequence, while VP2 and VP3 are shorter components of the whole. As a result, changes in the sequence in the VP3 region, are also changes to VP1 and VP2, however, the percent difference as compared to the parent sequence will be greatest for VP3 since it is the shortest sequence of the three. Though described here in relation to the amino acid sequence, the nucleic acid sequence encoding these proteins can be similarly described. Together, the three capsid proteins assemble to create the AAV capsid protein. While not wishing to be bound by theory, the AAV capsid protein typically comprises a molar ratio of 1:1:10 of VP1:VP2:VP3. As used herein, an “AAV serotype” is defined primarily by the AAV capsid. In some instances, the ITRs are also specifically described by the AAV serotype (e.g., AAV2/9).

[0691] The AAV vector typically requires a co-helper (e.g., adenovirus) to undergo productive infection in cells. In the absence of such helper functions, the AAV virions essentially enter host cells but do not integrate into the cells' genome.

[0692] AAV vectors have been investigated for delivery of gene therapeutics because of several unique features. Non-limiting examples of the features include (i) the ability to infect both dividing and non-dividing cells; (ii) a broad host range for infectivity, including human cells; (iii) wild-type AAV has not been associated with any disease and has not been shown to replicate in infected cells; (iv) the lack of cell-mediated immune response against the vector, and (v) the non-integrative nature in a host chromosome thereby reducing potential for long-term genetic alterations. Moreover, infection with AAV vectors has minimal influence on changing the pattern of cellular gene expression (Stilwell and Samulski et al., Biotechniques, 2003, 34, 148, the contents of which are herein incorporated by reference in their entirety).

[0693] Typically, AAV vectors for GCase protein delivery may be recombinant viral vectors which are replication defective as they lack sequences encoding functional Rep and Cap proteins within the viral genome. In some cases, the defective AAV vectors may lack most or all coding sequences and essentially only contain one or two AAV ITR sequences and a payload sequence. In certain embodiments, the viral genome encodes GCase protein. In some embodiments, the viral genome encodes GCase protein and SapA protein. In some embodiments, the viral genome encodes GCase protein and SapC protein. For example, the viral genome can encode human GCase, human GCase+SapA, or human GCase+SapC protein(s).

[0694] In some embodiments, the viral genome may comprise one or more lysosomal targeting sequences (LTS).

[0695] In some embodiments, the viral genome may comprise one or more cell penetrating peptide sequences (CPP).

[0696] In some embodiments, a viral genome may comprise one or more lysosomal targeting sequences and one or more cell penetrating sequences.

[0697] In some embodiments, the AAV particles of the present disclosure may be introduced into mammalian cells.

[0698] AAV vectors may be modified to enhance the efficiency of delivery. Such modified AAV vectors of the present disclosure can be packaged efficiently and can be used to successfully infect the target cells at high frequency and with minimal toxicity.

[0699] In other embodiments, AAV particles of the present disclosure may be used to deliver GCase protein to the central nervous system (see, e.g., U.S. Pat. No. 6,180,613; the contents of which are herein incorporated by reference in their entirety) or to specific tissues of the CNS.

[0700] As used herein, the term “AAV vector” or “AAV particle” comprises a capsid and a viral genome comprising a payload. As used herein, “payload” or “payload region” refers to one or more polynucleotides or polynucleotide regions encoded by or within a viral genome or an expression product of such polynucleotide or polynucleotide region, e.g., a transgene, a polynucleotide encoding a polypeptide or multi-polypeptide, e.g., GCase protein.

[0701] It is understood that the compositions described herein may have additional conservative or non-essential amino acid substitutions, which do not have a substantial effect on their functions.

### AAV Capsids and Variants Thereof

[0702] In some embodiments, an AAV particle, e.g., an AAV particle for the vectorized delivery of protein described herein (e.g., a GBA protein), may comprise an AAV capsid polypeptide, e.g., an AAV capsid variant.

[0703] In some embodiments, the AAV capsid polypeptide, e.g., AAV capsid variant, allows for blood brain barrier penetration following intravenous administration. In some embodiments, the AAV capsid, e.g., AAV capsid variant, allows for blood brain barrier penetration following focused ultrasound (FUS), e.g., coupled with the intravenous administration of microbubbles (FUS-MB), or MRI-guided FUS coupled with intravenous administration. In some embodiments the AAV capsid, e.g., AAV capsid variant allows for increased distribution to a brain region. In some embodiments, the brain region comprises a frontal cortex, sensory cortex, motor cortex, caudate, dentate nucleus, cerebellar cortex, cerebral cortex, brain stem, hippocampus, thalamus, putamen, or a combination thereof. In some embodiments, the AAV capsid, e.g., AAV capsid variant allows for preferential transduction in a brain region relative to the transduction in the dorsal root ganglia (DRG).

[0704] In some embodiments the AAV capsid polypeptide, e.g., AAV capsid variant allows for increased distribution to a spinal cord region. In some embodiments, the spinal region comprises a cervical spinal cord region, thoracic spinal cord region, and/or lumbar spinal cord region.

[0705] In some embodiments, the AAV capsid polypeptide, e.g., an AAV capsid variant comprises a VOY101 capsid polypeptide, an AAVPHP.B (PHP.B) capsid polypeptide, a AAVPHP.N (PHP.N) capsid polypeptide, an AAV1 capsid polypeptide, an AAV2 capsid polypeptide, an AAV5 capsid polypeptide, an AAV9 capsid polypeptide, an AAV9 K449R capsid polypeptide, an AAVrh10 capsid polypeptide, or a functional variant thereof. In some embodiments, the AAV capsid polypeptide, e.g., AAV capsid variant, comprises an amino acid sequence of any of the AAV capsid polypeptides in Table 1, or an amino acid sequence substantially identical (e.g., having at least 70%, 75%, 80%, 85%, 90%, 92%, 95%, 97%, 98%, or 99% sequence identity) thereto. In some embodiments, the nucleotide sequence encoding the AAV capsid polypeptide comprises any one of the nucleotide sequences in Table 1, or a nucleotide sequence substantially identical (e.g., having at least 70%, 75%, 80%, 85%, 90%, 92%, 95%, 97%, 98%, or 99% sequence identity) thereto.

[0706] In some embodiments, the AAV capsid variant, described herein does not comprise an amino acid sequence present immediately subsequent to position 586, 588, or 589 numbered relative to SEQ ID NO: 138, having at least 5 consecutive amino acids corresponding to positions 586 to 599, e.g., 586 to 594, 587 to 595, 588 to 596, 589 to 597, 590 to 598 of any of the amino acid sequences in Table 1 of WO2020223276, the contents of which are hereby incorporated by reference in their entirety.

[0707] In any of the embodiments described herein, a position comprising 5 consecutive amino acids corresponding to positions 586 to 599, e.g., 586 to 594, 587 to 595, 588 to 5%, 589 to 597, 590 to 598 numbered relative to SEQ ID NO: 138 can be identified by providing an alignment of a reference sequence and a query sequence, wherein the reference sequence is SEQ ID NO: 138, and identifying the residues corresponding to the positions in the query sequence that correspond to positions 586 to 599, e.g., 586 to 594, 587 to 595, 588 to 5%, 589 to 597, 590 to 598 in the reference sequence.

[0708] In some embodiments, the AAV capsid polypeptide, e.g., AAV capsid variant, described herein does not comprise an amino acid sequence present immediately subsequent to position 586, 588, or 589 numbered relative to SEQ ID NO: 138, at least 5 consecutive amino acids corresponding to positions 586 to 599, e.g., 586 to 594, 587 to 595, 588 to 596, 589 to 597, 590 to 598, of SEQ ID NO: 138. In some embodiments, the AAV capsid polypeptide, e.g., AAV capsid variant, described herein, does not comprise an amino acid sequence present immediately subsequent to position 586, 588, or 589 numbered relative to SEQ ID NO: 138, having at least 5 consecutive amino acids corresponding to positions 586 to 599, e.g., 586 to 594, 587 to 595, 588 to 596, 589 to 597, 590 to 598 of SEQ ID NO: 12. In some embodiments, the AAV capsid polypeptide, e.g., AAV capsid variant, described herein, does not comprise an amino acid sequence present immediately subsequent to position 586, 588, or 589 numbered relative to SEQ ID NO: 138, having at least than 5 consecutive amino acids corresponding to positions 586 to 599, e.g., 586 to 594, 587 to 595, 588 to 596, 589 to 597, 590 to 598 of SEQ ID NO: 13. In some embodiments, the AAV capsid polypeptide, e.g., AAV capsid variant, or the parent AAV capsid may be, at a position other than 5 consecutive amino acids corresponding to positions 586 to 599, e.g., 586 to 594, 587 to 595, 588 to 596, 589 to 597, 590 to 598 of SEQ ID NO: 1.

TABLE 1
Exemplary full length capsid sequences

| | SEQ | |
|---|---|---|
| | ID | |
| Description | NO: | Sequence Information |
| VOY101 | 1 | MAADGYLPDWLEDNLSEGIREWWALKPGAPQPKANQQHQDNARGLVLPGYKYLGPGNGL |
| | | DKGEPVNAADAAALEHDKAYDQQLKAGDNPYLKYNHADAEFQERLKEDTSFGGNLGRAV |
| | | FQAKKRLLEPLGLVEEAAKTAPGKKRPVEQSPQEPDSSAGIGKSGAQPAKKRLNFGQTG |
| | | DTESVPDPQPIGEPPAAPSGVGSLTMASGGGAPVADNNEGADGVGSSSGNWHCDSQWLG |
| | | DRVITTSTRTWALPTYNNHLYKQISNSTSGGSSNDNAYFGYSTPWGYFDFNRFHCHFSP |
| | | RDWQRLINNNWGFRPKRLNFKLFNIQVKEVTDNNGVKTIANNLTSTVQVFTDSDYQLPY |
| | | VLGSAHEGCLPPFPADVFMIPQYGYLTLNDGSQAVGRSSFYCLEYFPSQMLRTGNNFQF |
| | | SYEFENVPFHSSYAHSQSLDRLMNPLIDQYLYYLSKTINGSGQNQQTLKFSVAGPSNMA |
| | | VQGRNYIPGPSYRQQRVSTTVTQNNNSEFAWPGASSWALNGRNSLMNPGPAMASHKEGE |
| | | DRFFPLSGSLIFGKQGTGRDNVDADKVMITNEEEIKTTNPVATESYGQVATNHQSDGTL |
| | | AVPFKAQAQTGWVQNQGILPGMVWQDRDVYLQGPIWAKIPHTDGNFHPSPLMGGFGMKH |
| | | PPPQILIKNTPVPADPPTAFNKDKLNSFITQYSTGQVSVEIEWELQKENSKRWNPEIQY |
| | | TSNYYKSNNVEFAVNTEGVYSEPRPIGTRYLTRNL |
| AAV9/hu.14 | 11 | MAADGYLPDWLEDNLSEGIREWWALKPGAPQPKANQQHQDNARGLVLPGYKYLGPGNGL |
| K449R | | DKGEPVNAADAAALEHDKAYDQQLKAGDNPYLKYNHADAEFQERLKEDTSFGGNLGRAV |
| | | FQAKKRLLEPLGLVEEAAKTAPGKKRPVEQSPQEPDSSAGIGKSGAQPAKKRLNFGQTG |
| | | DTESVPDPQPIGEPPAAPSGVGSLTMASGGGAPVADNNEGADGVGSSSGNWHCDSQWLG |
| | | DRVITTSTRTWALPTYNNHLYKQISNSTSGGSSNDNAYFGYSTPWGYFDFNRFHCHFSP |
| | | RDWQRLINNNWGFRPKRLNFKLFNIQVKEVTDNNGVKTIANNLTSTVQVFTDSDYQLPY |
| | | VLGSAHEGCLPPFPADVFMIPQYGYLTLNDGSQAVGRSSFYCLEYFPSQMLRTGNNFQF |
| | | SYEFENVPFHSSYAHSQSLDRLMNPLIDQYLYYLSRTINGSGQNQQTLKFSVAGPSNMA |
| | | VQGRNYIPGPSYRQQRVSTTVTQNNNSEFAWPGASSWALNGRNSLMNPGPAMASHKEGE |
| | | DRFFPLSGSLIFGKQGTGRDNVDADKVMITNEEEIKTTNPVATESYGQVATNHQSAQAQ |
| | | AQTGWVQNQGILPGMVWQDRDVYLQGPIWAKIPHTDGNFHPSPLMGGFGMKHPPPQILI |
| | | KNTPVPADPPTAFNKDKLNSFITQYSTGQVSVEIEWELQKENSKRWNPEIQYTSNYYKS |
| | | NNVEFAVNTEGVYSEPRPIGTRYLTRNL |
| AAV9/hu.14 | 138 | MAADGYLPDWLEDNLSEGIREWWALKPGAPQPKANQQHQDNARGLVLPGYKYLGPGNGL |
| WT | | DKGEPVNAADAAALEHDKAYDQQLKAGDNPYLKYNHADAEFQERLKEDTSFGGNLGRAV |
| (amino acid) | | FQAKKRLLEPLGLVEEAAKTAPGKKRPVEQSPQEPDSSAGIGKSGAQPAKKRLNFGQTG |
| | | DTESVPDPQPIGEPPAAPSGVGSLTMASGGGAPVADNNEGADGVGSSSGNWHCDSQWLG |
| | | DRVITTSTRTWALPTYNNHLYKQISNSTSGGSSNDNAYFGYSTPWGYFDFNRFHCHFSP |
| | | RDWQRLINNNWGFRPKRLNFKLFNIQVKEVTDNNGVKTIANNLTSTVQVFTDSDYQLPY |
| | | VLGSAHEGCLPPFPADVFMIPQYGYLTLNDGSQAVGRSSFYCLEYFPSQMLRTGNNFQF |
| | | SYEFENVPFHSSYAHSQSLDRLMNPLIDQYLYYLSKTINGSGQNQQTLKFSVAGPSNMA |
| | | VQGRNYIPGPSYRQQRVSTTVTQNNNSEFAWPGASSWALNGRNSLMNPGPAMASHKEGE |
| | | DRFFPLSGSLIFGKQGTGRDNVDADKVMITNEEEIKTTNPVATESYGQVATNHQSAQAQ |
| | | AQTGWVQNQGILPGMVWQDRDVYLQGPIWAKIPHTDGNFHPSPLMGGFGMKHPPPQILI |
| | | KNTPVPADPPTAFNKDKLNSFITQYSTGQVSVEIEWELQKENSKRWNPEIQYTSNYYKS |
| | | NNVEFAVNTEGVYSEPRPIGTRYLTRNL |
| AAV9/hu.14 | 137 | ATGGCTGCCGATGGTTATCTTCCAGATTGGCTCGAGGACAACCTTAGTGAAGGAATTCG |
| WT | | CGAGTGGTGGGCTTTGAAACCTGGAGCCCCTCAACCCAAGGCAAATCAACAACATCAAG |
| (DNA) | | ACAACGCTCGAGGTCTTGTGCTTCCGGGTTACAAATACCTTGGACCCGGCAACGGACTC |
| | | GACAAGGGGGAGCCGGTCAACGCAGCAGACGCGGCGGCCCTCGAGCACGACAAGGCCTA |
| | | CGACCAGCAGCTCAAGGCCGGAGACAACCCGTACCTCAAGTACAACCACGCCGACGCCG |
| | | AGTTCCAGGAGCGGCTCAAAGAAGATACGTCTTTTGGGGGCAACCTCGGGCGAGCAGTC |
| | | TTCCAGGCCAAAAAGAGGCTTCTTGAACCTCTTGGTCTGGTTGAGGAAGCGGCTAAGAC |
| | | GGCTCCTGGAAAGAAGAGGCCTGTAGAGCAGTCTCCTCAGGAACCGGACTCCTCCGCGG |
| | | GTATTGGCAAATCGGGTGCACAGCCCGCTAAAAAGAGACTCAATTTCGGTCAGACTGGC |
| | | GACACAGAGTCAGTCCCAGACCCTCAACCAATCGGAGAACCTCCCGCAGCCCCCTCAGG |
| | | TGTGGGATCTCTTACAATGGCTTCAGGTGGTGGCGCACCAGTGGCAGACAATAACGAAG |
| | | GTGCCGATGGAGTGGGTAGTTCCTCGGGAAATTGGCATTGCGATTCCCAATGGCTGGGG |
| | | GACAGAGTCATCACCACCAGCACCCGAACCTGGGCCCTGCCCACCTACAACAATCACCT |
| | | CTACAAGCAAATCTCCAACAGCACATCTGGAGGATCTTCAAATGACAACGCCTACTTCG |
| | | GCTACAGCACCCCCTGGGGGTATTTTGACTTCAACAGATTCCACTGCCACTTCTCACCA |
| | | CGTGACTGGCAGCGACTCATCAACAACAACTGGGGATTCCGGCCTAAGCGACTCAACTT |
| | | CAAGCTCTTCAACATTCAGGTCAAAGAGGTTACGGACAACAATGGAGTCAAGACCATCG |
| | | CCAATAACCTTACCAGCACGGTCCAGGTCTTCACGGACTCAGACTATCAGCTCCCGTAC |
| | | GTGCTCGGGTCGGCTCACGAGGGCTGCCTCCCGCCGTTCCCAGCGGACGTTTTCATGAT |
| | | TCCTCAGTACGGGTATCTGACGCTTAATGATGGAAGCCAGGCCGTGGGTCGTTCGTCCT |
| | | TTTACTGCCTGGAATATTTCCCGTCGCAAATGCTAAGAACGGGTAACAACTTCCAGTTC |
| | | AGCTACGAGTTTGAGAACGTACCTTTCCATAGCAGCTACGCTCACAGCCAAAGCCTGGA |
| | | CCGACTAATGAATCCACTCATCGACCAATACTTGTACTATCTCTCAAAGACTATTAACG |
| | | GTTCTGGACAGAATCAACAAACGCTAAAATTCAGTGTGGCCGGACCCAGCAACATGGCT |
| | | GTCCAGGGAAGAAACTACATACCTGGACCCAGCTACCGACAACAACGTGTCTCAACCAC |
| | | TGTGACTCAAAACAACAACAGCGAATTTGCTTGGCCTGGAGCTTCTTCTTGGGCTCTCA |
| | | ATGGACGTAATAGCTTGATGAATCCTGGACCTGCTATGGCCAGCCACAAAGAAGGAGAG |
| | | GACCGTTTCTTTCCTTTGTCTGGATCTTTAATTTTTGGCAAACAAGGAACTGGAAGAGA |
| | | CAACGTGGATGCGGACAAAGTCATGATAACCAACGAAGAAGAAATTAAAACTACTAACC |
| | | CGGTAGCAACGGAGTCCTATGGACAAGTGGCCACAAACCACCAGAGTGCCCAAGCACAG |
| | | GCGCAGACCGGCTGGGTTCAAAACCAAGGAATACTTCCGGGTATGGTTTGGCAGGACAG |
| | | AGATGTGTACCTGCAAGGACCCATTTGGGCCAAAATTCCTCACACGGACGGCAACTTTC |
| | | ACCCTTCTCCGCTGATGGGAGGGTTTGGAATGAAGCACCCGCCTCCTCAGATCCTCATC |
| | | AAAAACACACCTGTACCTGCGGATCCTCCAACGGCCTTCAACAAGGACAAGCTGAACTC |
| | | TTTCATCACCCAGTATTCTACTGGCCAAGTCAGCGTGGAGATCGAGTGGGAGCTGCAGA |
| | | AGGAAAACAGCAAGCGCTGGAACCCGGAGATCCAGTACACTTCCAACTATTACAAGTCT |
| | | AATAATGTTGAATTTGCTGTTAATACTGAAGGTGTATATAGTGAACCCCGCCCCATTGG |
| | | CACCAGATACCTGACTCGTAATCTGTAA |
| PHP.B | 12 | MAADGYLPDWLEDNLSEGIREWWALKPGAPQPKANQQHQDNARGLVLPGYKYLGPGNGL |
| (amino acid) | | DKGEPVNAADAAALEHDKAYDQQLKAGDNPYLKYNHADAEFQERLKEDTSFGGNLGRAV |
| | | FQAKKRLLEPLGLVEEAAKTAPGKKRPVEQSPQEPDSSAGIGKSGAQPAKKRLNFGQTG |
| | | DTESVPDPQPIGEPPAAPSGVGSLTMASGGGAPVADNNEGADGVGSSSGNWHCDSQWLG |
| | | DRVITTSTRTWALPTYNNHLYKQISNSTSGGSSNDNAYFGYSTPWGYFDFNRFHCHFSP |
| | | RDWQRLINNNWGFRPKRLNFKLFNIQVKEVTDNNGVKTIANNLTSTVQVFTDSDYQLPY |
| | | VLGSAHEGCLPPFPADVFMIPQYGYLTLNDGSQAVGRSSFYCLEYFPSQMLRTGNNFQF |
| | | SYEFENVPFHSSYAHSQSLDRLMNPLIDQYLYYLSRTINGSGQNQQTLKFSVAGPSNMA |
| | | VQGRNYIPGPSYRQQRVSTTVTQNNNSEFAWPGASSWALNGRNSLMNPGPAMASHKEGE |
| | | DRFFPLSGSLIFGKQGTGRDNVDADKVMITNEEEIKTTNPVATESYGQVATNHQSAQTL |
| | | AVPFKAQAQTGWVQNQGILPGMVWQDRDVYLQGPIWAKIPHTDGNFHPSPLMGGFGMKH |
| | | PPPQILIKNTPVPADPPTAFNKDKLNSFITQYSTGQVSVEIEWELQKENSKRWNPEIQY |
| | | TSNYYKSNNVEFAVNTEGVYSEPRPIGTRYLTRNL |
| PHP.N | 13 | MAADGYLPDWLEDNLSEGIREWWALKPGAPQPKANQQHQDNARGLVLPGYKYLGPGNGL |
| (amino acid) | | DKGEPVNAADAAALEHDKAYDQQLKAGDNPYLKYNHADAEFQERLKEDTSFGGNLGRAV |
| | | FQAKKRLLEPLGLVEEAAKTAPGKKRPVEQSPQEPDSSAGIGKSGAQPAKKRLNFGQTG |
| | | DTESVPDPQPIGEPPAAPSGVGSLTMASGGGAPVADNNEGADGVGSSSGNWHCDSQWLG |
| | | DRVITTSTRTWALPTYNNHLYKQISNSTSGGSSNDNAYFGYSTPWGYFDFNRFHCHFSP |
| | | RDWQRLINNNWGFRPKRLNFKLFNIQVKEVTDNNGVKTIANNLTSTVQVFTDSDYQLPY |
| | | VLGSAHEGCLPPFPADVFMIPQYGYLTLNDGSQAVGRSSFYCLEYFPSQMLRTGNNFQF |
| | | SYEFENVPFHSSYAHSQSLDRLMNPLIDQYLYYLSRTINGSGQNQQTLKFSVAGPSNMA |
| | | VQGRNYIPGPSYRQQRVSTTVTQNNNSEFAWPGASSWALNGRNSLMNPGPAMASHKEGE |
| | | DRFFPLSGSLIFGKQGTGRDNVDADKVMITNEEEIKTTNPVATESYGQVATNHQSDGTL |
| | | AVPFKAQAQTGWVQNQGILPGMVWQDRDVYLQGPIWAKIPHTDGNFHPSPLMGGFGMKH |
| | | PPPQILIKNTPVPADPPTAFNKDKLNSFITQYSTGQVSVEIEWELQKENSKRWNPEIQY |
| | | TSNYYKSNNVEFAVNTEGVYSEPRPIGTRYLTRNL |
| AAVrh10 | 14 | MAADGYLPDWLEDNLSEGIREWWDLKPGAPKPKANQQKQDDGRGLVLPGYKYLGPFNGL |
| (amino acid) | | DKGEPVNAADAAALEHDKAYDQQLKAGDNPYLRYNHADAEFQERLQEDTSFGGNLGRAV |
| | | FQAKKRVLEPLGLVEEGAKTAPGKKRPVEPSPQRSPDSSTGIGKKGQQPAKKRLNFGQT |
| | | GDSESVPDPQPIGEPPAGPSGLGSGTMAAGGGAPMADNNEGADGVGSSSGNWHCDSTWL |
| | | GDRVITTSTRTWALPTYNNHLYKQISNGTSGGSTNDNTYFGYSTPWGYFDFNRFHCHFS |
| | | PRDWQRLINNNWGFRPKRLNFKLFNIQVKEVTQNEGTKTIANNLTSTIQVFTDSEYQLP |
| | | YVLGSAHQGCLPPFPADVFMIPQYGYLTLNNGSQAVGRSSFYCLEYFPSQMLRTGNNFE |
| | | FSYQFEDVPFHSSYAHSQSLDRLMNPLIDQYLYYLSRTQSTGGTAGTQQLLFSQAGPNN |
| | | MSAQAKNWLPGPCYRQQRVSTTLSQNNNSNFAWTGATKYHLNGRDSLVNPGVAMATHKD |
| | | DEERFFPSSGVLMFGKQGAGKDNVDYSSVMLTSEEEIKTTNPVATEQYGVVADNLQQQN |
| | | AAPIVGAVNSQGALPGMVWQNRDVYLQGPIWAKIPHTDGNFHPSPLMGGFGLKHPPPQI |
| | | LIKNTPVPADPPTTFSQAKLASFITQYSTGQVSVEIEWELQKENSKRWNPEIQYTSNYY |
| | | KSTNVDFAVNTDGTYSEPRPIGTRYLTRNL |
| AAVrh10 | 15 | ATGGCTGCCGATGGTTATCTTCCAGATTGGCTCGAGGACAACCTCTCTGAGGGCATTCG |
| (DNA) | | CGAGTGGTGGGACTTGAAACCTGGAGCCCCGAAACCCAAAGCCAACCAGCAAAAGCAGG |
| | | ACGACGGCCGGGGTCTGGTGCTTCCTGGCTACAAGTACCTCGGACCCTTCAACGGACTC |
| | | GACAAGGGGGAGCCCGTCAACGCGGCGGACGCAGCGGCCCTCGAGCACGACAAGGCCTA |
| | | CGACCAGCAGCTCAAAGCGGGTGACAATCCGTACCTGCGGTATAACCACGCCGACGCCG |
| | | AGTTTCAGGAGCGTCTGCAAGAAGATACGTCTTTTGGGGGCAACCTCGGGCGAGCAGTC |
| | | TTCCAGGCCAAGAAGCGGGTTCTCGAACCTCTCGGTCTGGTTGAGGAAGGCGCTAAGAC |
| | | GGCTCCTGGAAAGAAGAGACCGGTAGAGCCATCACCCCAGCGTTCTCCAGACTCCTCTA |
| | | CGGGCATCGGCAAGAAAGGCCAGCAGCCCGCGAAAAAGAGACTCAACTTTGGGCAGACT |
| | | GGCGACTCAGAGTCAGTGCCCGACCCTCAACCAATCGGAGAACCCCCCGCAGGCCCCTC |
| | | TGGTCTGGGATCTGGTACAATGGCTGCAGGCGGTGGCGCTCCAATGGCAGACAATAACG |
| | | AAGGCGCCGACGGAGTGGGTAGTTCCTCAGGAAATTGGCATTGCGATTCCACATGGCTG |
| | | GGCGACAGAGTCATCACCACCAGCACCCGAACCTGGGCCCTCCCCACCTACAACAACCA |
| | | CCTCTACAAGCAAATCTCCAACGGGACTTCGGGAGGAAGCACCAACGACAACACCTACT |
| | | TCGGCTACAGCACCCCCTGGGGGTATTTTGACTTTAACAGATTCCACTGCCACTTCTCA |
| | | CCACGTGACTGGCAGCGACTCATCAACAACAACTGGGGATTCCGGCCCAAGAGACTCAA |
| | | CTTCAAGCTCTTCAACATCCAGGTCAAGGAGGTCACGCAGAATGAAGGCACCAAGACCA |
| | | TCGCCAATAACCTTACCAGCACGATTCAGGTCTTTACGGACTCGGAATACCAGCTCCCG |
| | | TACGTCCTCGGCTCTGCGCACCAGGGCTGCCTGCCTCCGTTCCCGGCGGACGTCTTCAT |
| | | GATTCCTCAGTACGGGTACCTGACTCTGAACAATGGCAGTCAGGCCGTGGGCCGTTCCT |
| | | CCTTCTACTGCCTGGAGTACTTTCCTTCTCAAATGCTGAGAACGGGCAACAACTTTGAG |
| | | TTCAGCTACCAGTTTGAGGACGTGCCTTTTCACAGCAGCTACGCGCACAGCCAAAGCCT |
| | | GGACCGGCTGATGAACCCCCTCATCGACCAGTACCTGTACTACCTGTCTCGGACTCAGT |
| | | CCACGGGAGGTACCGCAGGAACTCAGCAGTTGCTATTTTCTCAGGCCGGGCCTAATAAC |
| | | ATGTCGGCTCAGGCCAAAAACTGGCTACCCGGGCCCTGCTACCGGCAGCAACGCGTCTC |
| | | CACGACACTGTCGCAAAATAACAACAGCAACTTTGCCTGGACCGGTGCCACCAAGTATC |
| | | ATCTGAATGGCAGAGACTCTCTGGTAAATCCCGGTGTCGCTATGGCAACCCACAAGGAC |
| | | GACGAAGAGCGATTTTTTCCGTCCAGCGGAGTCTTAATGTTTGGGAAACAGGGAGCTGG |
| | | AAAAGACAACGTGGACTATAGCAGCGTTATGCTAACCAGTGAGGAAGAAATTAAAACCA |
| | | CCAACCCAGTGGCCACAGAACAGTACGGCGTGGTGGCCGATAACCTGCAACAGCAAAAC |
| | | GCCGCTCCTATTGTAGGGGCCGTCAACAGTCAAGGAGCCTTACCTGGCATGGTCTGGCA |
| | | GAACCGGGACGTGTACCTGCAGGGTCCTATCTGGGCCAAGATTCCTCACACGGACGGAA |
| | | ACTTTCATCCCTCGCCGCTGATGGGAGGCTTTGGACTGAAACACCCGCCTCCTCAGATC |
| | | CTGATTAAGAATACACCTGTTCCCGCGGATCCTCCAACTACCTTCAGTCAAGCTAAGCT |
| | | GGCGTCGTTCATCACGCAGTACAGCACCGGACAGGTCAGCGTGGAAATTGAATGGGAGC |
| | | TGCAGAAAGAAAACAGCAAACGCTGGAACCCAGAGATTCAATACACTTCCAACTACTAC |
| | | AAATCTACAAATGTGGACTTTGCTGTTAACACAGATGGCACTTATTCTGAGCCTCGCCC |
| | | CATCGGCACCCGTTACCTCACCCGTAATCTGTAA |
| AAV2 | 16 | MAADGYLPDWLEDTLSEGIRQWWKLKPGPPPPKPAERHKDDSRGLVLPGYKYLGPFNGL |
| (amino acid) | | DKGEPVNEADAAALEHDKAYDRQLDSGDNPYLKYNHADAEFQERLKEDTSFGGNLGRAV |
| | | FQAKKRVLEPLGLVEEPVKTAPGKKRPVEHSPVEPDSSSGTGKAGQQPARKRLNFGQTG |
| | | DADSVPDPQPLGQPPAAPSGLGTNTMATGSGAPMADNNEGADGVGNSSGNWHCDSTWMG |
| | | DRVITTSTRTWALPTYNNHLYKQISSQSGASNDNHYFGYSTPWGYFDFNRFHCHFSPRD |
| | | WQRLINNNWGFRPKRLNFKLFNIQVKEVTQNDGTTTIANNLTSTVQVFTDSEYQLPYVL |
| | | GSAHQGCLPPFPADVFMVPQYGYLTLNNGSQAVGRSSFYCLEYFPSQMLRTGNNFTFSY |
| | | TFEDVPFHSSYAHSQSLDRLMNPLIDQYLYYLSRTNTPSGTTTQSRLQFSQAGASDIRD |
| | | QSRNWLPGPCYRQQRVSKTSADNNNSEYSWTGATKYHLNGRDSLVNPGPAMASHKDDEE |
| | | KFFPQSGVLIFGKQGSEKTNVDIEKVMITDEEEIRTTNPVATEQYGSVSTNLQRGNRQA |
| | | ATADVNTQGVLPGMVWQDRDVYLQGPIWAKIPHTDGHFHPSPLMGGFGLKHPPPQILIK |
| | | NTPVPANPSTTFSAAKFASFITQYSTGQVSVEIEWELQKENSKRWNPEIQYTSNYNKSV |
| | | NVDFTVDTNGVYSEPRPIGTRYLTRNL |
| AAV2 | 17 | ATGGCTGCCGATGGTTATCTTCCAGATTGGCTCGAGGACACTCTCTCTGAAGGAATAAG |
| (DNA) | | ACAGTGGTGGAAGCTCAAACCTGGCCCACCACCACCAAAGCCCGCAGAGCGGCATAAGG |
| | | ACGACAGCAGGGGTCTTGTGCTTCCTGGGTACAAGTACCTCGGACCCTTCAACGGACTC |
| | | GACAAGGGAGAGCCGGTCAACGAGGCAGACGCCGCGGCCCTCGAGCACGACAAAGCCTA |
| | | CGACCGGCAGCTCGACAGCGGAGACAACCCGTACCTCAAGTACAACCACGCCGACGCGG |
| | | AGTTTCAGGAGCGCCTTAAAGAAGATACGTCTTTTGGGGGCAACCTCGGACGAGCAGTC |
| | | TTCCAGGCGAAAAAGAGGGTTCTTGAACCTCTGGGCCTGGTTGAGGAACCTGTTAAGAC |
| | | GGCTCCGGGAAAAAAGAGGCCGGTAGAGCACTCTCCTGTGGAGCCAGACTCCTCCTCGG |
| | | GAACCGGAAAGGCGGGCCAGCAGCCTGCAAGAAAAAGATTGAATTTTGGTCAGACTGGA |
| | | GACGCAGACTCAGTACCTGACCCCCAGCCTCTCGGACAGCCACCAGCAGCCCCCTCTGG |
| | | TCTGGGAACTAATACGATGGCTACAGGCAGTGGCGCACCAATGGCAGACAATAACGAGG |
| | | GCGCCGACGGAGTGGGTAATTCCTCGGGAAATTGGCATTGCGATTCCACATGGATGGGC |
| | | GACAGAGTCATCACCACCAGCACCCGAACCTGGGCCCTGCCCACCTACAACAACCACCT |
| | | CTACAAACAAATTTCCAGCCAATCAGGAGCCTCGAACGACAATCACTACTTTGGCTACA |
| | | GCACCCCTTGGGGGTATTTTGACTTCAACAGATTCCACTGCCACTTTTCACCACGTGAC |
| | | TGGCAAAGACTCATCAACAACAACTGGGGATTCCGACCCAAGAGACTCAACTTCAAGCT |
| | | CTTTAACATTCAAGTCAAAGAGGTCACGCAGAATGACGGTACGACGACGATTGCCAATA |
| | | ACCTTACCAGCACGGTTCAGGTGTTTACTGACTCGGAGTACCAGCTCCCGTACGTCCTC |
| | | GGCTCGGCGCATCAAGGATGCCTCCCGCCGTTCCCAGCAGACGTCTTCATGGTGCCACA |
| | | GTATGGATACCTCACCCTGAACAACGGGAGTCAGGCAGTAGGACGCTCTTCATTTTACT |
| | | GCCTGGAGTACTTTCCTTCTCAGATGCTGCGTACCGGAAACAACTTTACCTTCAGCTAC |
| | | ACTTTTGAGGACGTTCCTTTCCACAGCAGCTACGCTCACAGCCAGAGTCTGGACCGTCT |
| | | CATGAATCCTCTCATCGACCAGTACCTGTATTACTTGAGCAGAACAAACACTCCAAGTG |
| | | GAACCACCACGCAGTCAAGGCTTCAGTTTTCTCAGGCCGGAGCGAGTGACATTCGGGAC |
| | | CAGTCTAGGAACTGGCTTCCTGGACCCTGTTACCGCCAGCAGCGAGTATCAAAGACATC |
| | | TGCGGATAACAACAACAGTGAATACTCGTGGACTGGAGCTACCAAGTACCACCTCAATG |
| | | GCAGAGACTCTCTGGTGAATCCGGGCCCGGCCATGGCAAGCCACAAGGACGATGAAGAA |
| | | AAGTTTTTTCCTCAGAGCGGGGTTCTCATCTTTGGGAAGCAAGGCTCAGAGAAAACAAA |
| | | TGTGGACATTGAAAAGGTCATGATTACAGACGAAGAGGAAATCAGGACAACCAATCCCG |
| | | TGGCTACGGAGCAGTATGGTTCTGTATCTACCAACCTCCAGAGAGGCAACAGACAAGCA |
| | | GCTACCGCAGATGTCAACACACAAGGCGTTCTTCCAGGCATGGTCTGGCAGGACAGAGA |
| | | TGTGTACCTTCAGGGGCCCATCTGGGCAAAGATTCCACACACGGACGGACATTTTCACC |
| | | CCTCTCCCCTCATGGGTGGATTCGGACTTAAACACCCTCCTCCACAGATTCTCATCAAG |
| | | AACACCCCGGTACCTGCGAATCCTTCGACCACCTTCAGTGCGGCAAAGTTTGCTTCCTT |
| | | CATCACACAGTACTCCACGGGACAGGTCAGCGTGGAGATCGAGTGGGAGCTGCAGAAGG |
| | | AAAACAGCAAACGCTGGAATCCCGAAATTCAGTACACTTCCAACTACAACAAGTCTGTT |
| | | AATGTGGACTTTACTGTGGACACTAATGGCGTGTATTCAGAGCCTCGCCCCATTGGCAC |
| | | CAGATACCTGACTCGTAATCTGTAA |
| AAV1 | 18 | MAADGYLPDWLEDNLSEGIREWWDLKPGAPKPKANQQKQDDGRGLVLPGYKYLGPFNGL |
| (amino acid) | | DKGEPVNAADAAALEHDKAYDQQLKAGDNPYLRYNHADAEFQERLQEDTSFGGNLGRAV |
| | | FQAKKRVLEPLGLVEEGAKTAPGKKRPVEQSPQEPDSSSGIGKTGQQPAKKRLNFGQTG |
| | | DSESVPDPQPLGEPPATPAAVGPTTMASGGGAPMADNNEGADGVGNASGNWHCDSTWLG |
| | | DRVITTSTRTWALPTYNNHLYKQISSASTGASNDNHYFGYSTPWGYFDFNRFHCHFSPR |
| | | DWQRLINNNWGFRPKRLNFKLFNIQVKEVTTNDGVTTIANNLTSTVQVFSDSEYQLPYV |
| | | LGSAHQGCLPPFPADVFMIPQYGYLTLNNGSQAVGRSSFYCLEYFPSQMLRTGNNFTFS |
| | | YTFEEVPFHSSYAHSQSLDRLMNPLIDQYLYYLNRTQNQSGSAQNKDLLFSRGSPAGMS |
| | | VQPKNWLPGPCYRQQRVSKTKTDNNNSNFTWTGASKYNLNGRESIINPGTAMASHKDDE |
| | | DKFFPMSGVMIFGKESAGASNTALDNVMITDEEEIKATNPVATERFGTVAVNFQSSSTD |
| | | PATGDVHAMGALPGMVWQDRDVYLQGPIWAKIPHTDGHFHPSPLMGGFGLKNPPPQILI |
| | | KNTPVPANPPAEFSATKFASFITQYSTGQVSVEIEWELQKENSKRWNPEVQYTSNYAKS |
| | | ANVDFTVDNNGLYTEPRPIGTRYLTRPL |
| AAV1 | 19 | atggctgccgatggttatcttccagattggctcgaggacaacctctctgagggcattcg |
| (DNA) | | cgagtggtgggacttgaaacctggagccccgaagcccaaagccaaccagcaaaagcagg |
| | | acgacggccggggtctggtgcttcctggctacaagtacctcggacccttcaacggactc |
| | | gacaagggggagcccgtcaacgcggcggacgcagcggccctcgagcacgacaaggccta |
| | | cgaccagcagctcaaagcgggtgacaatccgtacctgcggtataaccacgccgacgccg |
| | | agtttcaggagcgtctgcaagaagatacgtcttttgggggcaacctcgggcgagcagtc |
| | | ttccaggccaagaagcgggttctcgaacctctcggtctggttgaggaaggcgctaagac |
| | | ggctcctggaaagaaacgtccggtagagcagtcgccacaagagccagactcctcctcgg |
| | | gcatcggcaagacaggccagcagcccgctaaaaagagactcaattttggtcagactggc |
| | | gactcagagtcagtccccgatccacaacctctcggagaacctccagcaacccccgctgc |
| | | tgtgggacctactacaatggcttcaggcggtggcgcaccaatggcagacaataacgaag |
| | | gcgccgacggagtgggtaatgcctcaggaaattggcattgcgattccacatggctgggc |
| | | gacagagtcatcaccaccagcacccgcacctgggccttgcccacctacaataaccacct |
| | | ctacaagcaaatctccagtgcttcaacgggggccagcaacgacaaccactacttcggct |
| | | acagcaccccctgggggtattttgatttcaacagattccactgccacttttcaccacgt |
| | | gactggcagcgactcatcaacaacaattggggattccggcccaagagactcaacttcaa |
| | | actcttcaacatccaagtcaaggaggtcacgacgaatgatggcgtcacaaccatcgcta |
| | | ataaccttaccagcacggttcaagtcttctcggactcggagtaccagcttccgtacgtc |
| | | ctcggctctgcgcaccagggctgcctccctccgttcccggcggacgtgttcatgattcc |
| | | gcaatacggctacctgacgctcaacaatggcagccaagccgtgggacgttcatcctttt |
| | | actgcctggaatatttcccttctcagatgctgagaacgggcaacaactttaccttcagc |
| | | tacacctttgaggaagtgcctttccacagcagctacgcgcacagccagagcctggaccg |
| | | gctgatgaatcctctcatcgaccaatacctgtattacctgaacagaactcaaaatcagt |
| | | ccggaagtgcccaaaacaaggacttgctgtttagccgtgggtctccagctggcatgtct |
| | | gttcagcccaaaaactggctacctggaccctgttatcggcagcagcgcgtttctaaaac |
| | | aaaaacagacaacaacaacagcaattttacctggactggtgcttcaaaatataacctca |
| | | atgggcgtgaatccatcatcaaccctggcactgctatggcctcacacaaagacgacgaa |
| | | gacaagttctttcccatgagcggtgtcatgatttttggaaaagagagcgccggagcttc |
| | | aaacactgcattggacaatgtcatgattacagacgaagaggaaattaaagccactaacc |
| | | ctgtggccaccgaaagatttgggaccgtggcagtcaatttccagagcagcagcacagac |
| | | cctgcgaccggagatgtgcatgctatgggagcattacctggcatggtgtggcaagatag |
| | | agacgtgtacctgcagggtcccatttgggccaaaattcctcacacagatggacactttc |
| | | acccgtctcctcttatgggcggctttggactcaagaacccgcctcctcagatcctcatc |
| | | aaaaacacgcctgttcctgcgaatcctccggcggagttttcagctacaaagtttgcttc |
| | | attcatcacccaatactccacaggacaagtgagtgtggaaattgaatgggagctgcaga |
| | | aagaaaacagcaagcgctggaatcccgaagtgcagtacacatccaattatgcaaaatct |
| | | gccaacgttgattttactgtggacaacaatggactttatactgagcctcgccccattgg |
| | | cacccgttaccttacccgtcccctgtaa |
| AAV5 | 20 | MSFVDHPPDWLEEVGEGLREFLGLEAGPPKPKPNQQHQDQARGLVLPGYNYLGPGNGLD |
| (amino acid) | | RGEPVNRADEVAREHDISYNEQLEAGDNPYLKYNHADAEFQEKLADDTSFGGNLGKAVF |
| | | QAKKRVLEPFGLVEEGAKTAPTGKRIDDHFPKRKKARTEEDSKPSTSSDAEAGPSGSQQ |
| | | LQIPAQPASSLGADTMSAGGGGPLGDNNQGADGVGNASGDWHCDSTWMGDRVVTKSTRT |
| | | WVLPSYNNHQYREIKSGSVDGSNANAYFGYSTPWGYFDFNRFHSHWSPRDWQRLINNYW |
| | | GFRPRSLRVKIFNIQVKEVTVQDSTTTIANNLTSTVQVFTDDDYQLPYVVGNGTEGCLP |
| | | AFPPQVFTLPQYGYATLNRDNTENPTERSSFFCLEYFPSKMLRTGNNFEFTYNFEEVPF |
| | | HSSFAPSQNLFKLANPLVDQYLYRFVSTNNTGGVQFNKNLAGRYANTYKNWFPGPMGRT |
| | | QGWNLGSGVNRASVSAFATTNRMELEGASYQVPPQPNGMTNNLQGSNTYALENTMIFNS |
| | | QPANPGTTATYLEGNMLITSESETQPVNRVAYNVGGQMATNNQSSTTAPATGTYNLQEI |
| | | VPGSVWMERDVYLQGPIWAKIPETGAHFHPSPAMGGFGLKHPPPMMLIKNTPVPGNITS |
| | | FSDVPVSSFITQYSTGQVTVEMEWELKKENSKRWNPEIQYTNNYNDPQFVDFAPDSTGE |
| | | YRTTRPIGTRYLTRPL |
| AAV5 | 21 | atgtcttttgttgatcaccctccagattggttggaagaagttggtgaaggtcttcgcga |
| (DNA) | | gtttttgggccttgaagcgggcccaccgaaaccaaaacccaatcagcagcatcaagatc |
| | | aagcccgtggtcttgtgctgcctggttataactatctcggacccggaaacggtctcgat |
| | | cgaggagagcctgtcaacagggcagacgaggtcgcgcgagagcacgacatctcgtacaa |
| | | cgagcagcttgaggcgggagacaacccctacctcaagtacaaccacgcggacgccgagt |
| | | ttcaggagaagctcgccgacgacacatccttcgggggaaacctcggaaaggcagtcttt |
| | | caggccaagaaaagggttctcgaaccttttggcctggttgaagagggtgctaagacggc |
| | | ccctaccggaaagcggatagacgaccactttccaaaaagaaagaaggcccggaccgaag |
| | | aggactccaagccttccacctcgtcagacgccgaagctggacccagcggatcccagcag |
| | | ctgcaaatcccagcccaaccagcctcaagtttgggagctgatacaatgtctgcgggagg |
| | | tggcggcccattgggcgacaataaccaaggtgccgatggagtgggcaatgcctcgggag |
| | | attggcattgcgattccacgtggatgggggacagagtcgtcaccaagtccacccgaacc |
| | | tgggtgctgcccagctacaacaaccaccagtaccgagagatcaaaagcggctccgtcga |
| | | cggaagcaacgccaacgcctactttggatacagcaccccctgggggtactttgacttta |
| | | accgcttccacagccactggagcccccgagactggcaaagactcatcaacaactactgg |
| | | ggcttcagaccccggtccctcagagtcaaaatcttcaacattcaagtcaaagaggtcac |
| | | ggtgcaggactccaccaccaccatcgccaacaacctcacctccaccgtccaagtgttta |
| | | cggacgacgactaccagctgccctacgtcgtcggcaacgggaccgagggatgcctgccg |
| | | gccttccctccgcaggtctttacgctgccgcagtacggttacgcgacgctgaaccgcga |
| | | caacacagaaaatcccaccgagaggagcagcttcttctgcctagagtactttcccagca |
| | | agatgctgagaacgggcaacaactttgagtttacctacaactttgaggaggtgcccttc |
| | | cactccagcttcgctcccagtcagaacctcttcaagctggccaacccgctggtggacca |
| | | gtacttgtaccgcttcgtgagcacaaataacactggcggagtccagttcaacaagaacc |
| | | tggccgggagatacgccaacacctacaaaaactggttcccggggcccatgggccgaacc |
| | | cagggctggaacctgggctccggggtcaaccgcgccagtgtcagcgccttcgccacgac |
| | | caataggatggagctcgagggcgcgagttaccaggtgcccccgcagccgaacggcatga |
| | | ccaacaacctccagggcagcaacacctatgccctggagaacactatgatcttcaacagc |
| | | cagccggcgaacccgggcaccaccgccacgtacctcgagggcaacatgctcatcaccag |
| | | cgagagcgagacgcagccggtgaaccgcgtggcgtacaacgtcggcgggcagatggcca |
| | | ccaacaaccagagctccaccactgcccccgcgaccggcacgtacaacctccaggaaatc |
| | | gtgcccggcagcgtgtggatggagagggacgtgtacctccaaggacccatctgggccaa |
| | | gatcccagagacgggggcgcactttcacccctctccggccatgggcggattcggactca |
| | | aacacccaccgcccatgatgctcatcaagaacacgcctgtgcccggaaatatcaccagc |
| | | ttctcggacgtgcccgtcagcagcttcatcacccagtacagcaccgggcaggtcaccgt |
| | | ggagatggagtgggagctcaagaaggaaaactccaagaggtggaacccagagatccagt |
| | | acacaaacaactacaacgacccccagtttgtggactttgccccggacagcaccggggaa |
| | | tacagaaccaccagacctatcggaacccgataccttacccgacccctttaa |

[0709] In some embodiments, the AAV capsid polypeptide, e.g., the AAV capsid variant, comprises the amino acid sequence of any of SEQ ID NOs: 1, 11, 138, 12, 13, 14, 16, 18, 20, or an amino acid sequence substantially identical (e.g., having at least 70%, 75%, 80%, 85%, 90%, 92%, 95%, 97%, 98%, or 99% sequence identity) thereto. In some embodiments the AAV capsid polypeptide, e.g., the AAV capsid variant, comprises an amino acid sequence comprising at least one, two, or three modifications, e.g., substitutions (e.g., conservative substitutions), insertions, or deletions, but no more than 30, 20, or 10 modifications, e.g., substitutions (e.g., conservative substitutions), insertions, or deletions, relative to the amino acid sequence of any of SEQ ID NOs: 1, 11, 138, 12, 13, 14, 16, 18, 20. In some embodiments, the AAV capsid polypeptide, e.g., the AAV capsid variant, comprises an amino acid sequence encoded by the nucleotide sequence of any of SEQ ID NOs: 137, 15, 17, 19, 21, or a nucleotide sequence substantially identical (e.g., having at least 70%, 75%, 80%, 85%, 90%, 92%, 95%, 97%, 98%, or 99% sequence identity) thereto.

[0710] In some embodiments, the nucleotide sequence encoding the AAV capsid polypeptide, e.g., the AAV capsid variant, comprises the nucleotide sequence of any of SEQ ID NOs: 137, 15, 17, 19, or 21, or a nucleotide sequence substantially identical (e.g., having at least 70%, 75%, 80%, 85%, 90%, 92%, 95%, 97%, 98%, or 99% sequence identity) thereto. In some embodiments, the nucleotide sequence encoding the AAV capsid polypeptide, e.g., the AAV capsid variant, comprises a nucleotide sequence comprising at least one, two, or three modifications, e.g., substitutions (e.g., conservative substitutions), insertions, or deletions, but no more than 30, 20, or 10 modifications, e.g., substitutions (e.g., conservative substitutions), insertions, or deletions, relative to the nucleotide sequence of any of SEQ ID NOs: 137, 15, 17, 19, or 21.

[0711] In some embodiments, the AAV capsid polypeptide, e.g., the AAV capsid variant, comprises the amino acid sequence of SEQ ID NO: 138 or an amino acid sequence substantially identical (e.g., having at least 70%, 75%, 80%, 85%, 90%, 92%, 95%, 97%, 98%, or 99% sequence identity) thereto. In some embodiments the AAV capsid polypeptide, e.g., the AAV capsid variant, comprises an amino acid sequence comprising at least one, two, or three modifications, e.g., substitutions (e.g., conservative substitutions), but no more than 30, 20, or 10 modifications, e.g., substitutions (e.g., conservative substitutions), relative to the amino acid sequence of SEQ ID NO: 138. In some embodiments, the AAV capsid polypeptide, e.g., the AAV capsid variant, comprises an amino acid sequence encoded by the nucleotide sequence of SEQ ID NO: 137 or a nucleotide sequence substantially identical (e.g., having at least 70%, 75%, 80%, 85%, 90%, 92%, 95%, 97%, 98%, or 99% sequence identity) thereto. In some embodiments, the nucleotide sequence encoding the AAV capsid polypeptide, e.g., the AAV capsid variant, comprises the nucleotide sequence of SEQ ID NO: 137 or a nucleotide sequence substantially identical (e.g., having at least 70%, 75%, 80%, 85%, 90%, 92%, 95%, 97%, 98%, or 99% sequence identity) thereto. In some embodiments, the AAV capsid polypeptide, e.g., the AAV capsid variant, comprises substitution at position K449, e.g., a K449R substitution, numbered according to SEQ ID NO: 138.

[0712] In some embodiments, the AAV capsid polypeptide, e.g., the AAV capsid variant, comprises a peptide comprising the amino acid sequence of TLAVPFK (SEQ ID NO: 1262). In some embodiments, the peptide is present immediately subsequent to position 588, relative to a reference sequence numbered according to SEQ ID NO: 138. In some embodiments, the capsid polypeptide comprises the amino acid substitutions of A587D and Q588G, numbered according to SEQ ID NO: 138.

[0713] In some embodiments, the AAV capsid polypeptide, e.g., the AAV capsid variant, comprises the amino acid substitution of K449R, numbered according to SEQ ID NO: 138; and a peptide comprising the amino acid sequence of TLAVPFK, wherein the peptide is present immediately subsequent to position 588, relative to a reference sequence numbered according to SEQ ID NO: 138.

[0714] In some embodiments, the AAV capsid polypeptide, e.g., the AAV capsid variant, comprises the amino acid substitution of K449R, numbered according to SEQ ID NO: 138; an peptide comprising the amino acid sequence of TLAVPFK (SEQ ID NO: 1262), wherein the insert is present immediately subsequent to position 588, relative to a reference sequence numbered according to SEQ ID NO: 138; and the amino acid substitutions of A587D and Q588G, numbered according to SEQ ID NO: 138.

[0715] In some embodiments, the AAV capsid polypeptide, e.g., the AAV capsid variant, comprises a peptide comprising the amino acid sequence of TLAVPFK (SEQ ID NO: 1262), wherein the insert is present immediately subsequent to position 588, relative to a reference sequence numbered according to SEQ ID NO: 138; and the amino acid substitutions of A587D and Q588G, numbered according to SEQ ID NO: 138.

[0716] In some embodiments, the AAV capsid polypeptide, e.g., the AAV capsid variant, comprises the amino acid sequence of SEQ ID NO: 11 or an amino acid sequence substantially identical (e.g., having at least 70%, 75%, 80%, 85%, 90%, 92%, 95%, 97%, 98%, or 99% sequence identity) thereto. In some embodiments the AAV capsid polypeptide, e.g., the AAV capsid variant, comprises an amino acid sequence comprising at least one, two, or three modifications, e.g., substitutions (e.g., conservative substitutions), but no more than 30, 20, or 10 modifications, e.g., substitutions (conservative substitutions), relative to the amino acid sequence of SEQ ID NO: 11, optionally wherein position 449 is not R.

[0717] In some embodiments, the capsid polypeptide, comprises the amino acid sequence of SEQ ID NO: 1 or an amino acid sequence substantially identical (e.g., having at least 70%, 75%, 80%, 85%, 90%, 92%, 95%, 97%, 98%, or 99% sequence identity) thereto. In some embodiments the AAV capsid polypeptide, e.g., the AAV capsid variant, comprises an amino acid sequence comprising at least one, two, or three modifications, e.g., substitutions (e.g., conservative substitutions), but no more than 30, 20, or 10 modifications, e.g., substitutions (e.g., conservative substitutions), relative to the amino acid sequence of SEQ ID NO: 1.

[0718] In some embodiments, an AAV capsid variant disclosed herein comprises a modification in loop VIII of AAV9, e.g., at positions between 580-599, e.g., at positions 587, 588, 589, and/or 590, numbered relative to SEQ ID NO: 5, 8, 138 or 3636-3647. In some embodiments, loop (e.g., loop VIII) is used interchangeably herein with the term variable region (e.g., variable region VIII), or VR (e.g., VR-VIII). In some embodiments loop VIII comprises positions 580-599 (e.g., amino acids VATNHQSAQAQAQTGWVQNQ (SEQ ID NO: 1195)), numbered according to SEQ ID NO: 138. In some embodiments, loop VIII comprises positions 582-593 (e.g., amino acids TNHQSAQAQAQT (SEQ ID NO: 11%)), numbered according to SEQ ID NO: 138. In some embodiments loop VIII comprises positions 587-593 (e.g., amino acids AQAQAQT (SEQ ID NO: 1197)), numbered according to SEQ ID NO: 138. In some embodiments loop VIII comprises positions 587-590 (e.g., amino acids AQAQ (SEQ ID NO: 4737)), numbered according to SEQ ID NO: 138. In some embodiments, loop VIII or variable region VIII (VR-VIII) is as described in DiMattia et al. “Structural Insights into the Unique Properties of the Adeno-Associated Virus Serotype 9,” Journal of Virology, 12(86):6947-6958 (the contents of which are hereby incorporated by reference in their entirety), e.g., comprising positions 581-593 (e.g., ATNHQSAQAQAQT (SEQ ID NO: 1198)), numbered according to SEQ ID NO: 138.

[0719] In some embodiments, an AAV particle described herein comprises an AAV capsid polypeptide, e.g., an AAV capsid variant. In some embodiments, the AAV capsid polypeptide, e.g., the AAV capsid variant, comprises a peptide sequence as described in Table 33, e.g., any one of peptides 1, 2, 3, 4, 5, 6, 7, 8, 9, 10, 11, or 12. In some embodiments, the peptide may increase distribution of an AAV particle to a cell, region, or tissue of the CNS. The cell of the CNS may be, but is not limited to, neurons (e.g., excitatory, inhibitory, motor, sensory, autonomic, sympathetic, parasympathetic, Purkinje, Betz, etc.), glial cells (e.g., microglia, astrocytes, oligodendrocytes) and/or supporting cells of the brain such as immune cells (e.g., T cells). The tissue of the CNS may be, but is not limited to, the cortex (e.g., frontal, parietal, occipital, temporal), thalamus, hypothalamus, striatum, putamen, caudate nucleus, hippocampus, entorhinal cortex, basal ganglia, or deep cerebellar nuclei. In some embodiments, the peptide may increase biodistribution of an AAV particle to a cell, region, or tissue of the PNS. The cell or tissue of the PNS may be, but is not limited to, a dorsal root ganglion (DRG). In some embodiments, the peptide may increase biodistribution of an AAV particle to the CNS (e.g., the cortex) after intravenous administration. In some embodiments, the peptide may increase biodistribution of an AAV particle to the CNS (e.g., the cortex) following focused ultrasound (FUS), e.g., coupled with the intravenous administration of microbubbles (FUS-MB), or MRI-guided FUS coupled with intravenous administration. In some embodiments, the peptide may increase biodistribution of an AAV particle to the PNS (e.g., DRG) after intravenous administration. In some embodiments, the peptide may increase biodistribution of an AAV particle to the PNS (e.g., DRG) following focused ultrasound (FUS), e.g., coupled with the intravenous administration of microbubbles (FUS-MB), or MRI-guided FUS coupled with intravenous administration. In some embodiments, the peptide may increase biodistribution of an AAV particle to a cell, region, or tissue of a muscle. In some embodiments, the muscle is a heart muscle. In some embodiments, the peptide may direct an AAV particle to a muscle cell, region, or tissue after intravenous administration.

TABLE 33
Exemplary Peptide Sequences

| | SEQ | Amino Acid | SEQ ID | |
|---|---|---|---|---|
| Peptide | ID NO: | Sequence | NO: | Nucleotide Sequence |
| 1 | 3648 | PLNGAVHLY | 3660 | CCGCTTAATGGTGCCGTCCATCTTTAT |
| 2 | 3649 | RDSPKGW | 3661 | CGTGATTCTCCGAAGGGTTGGCA |
| 3 | 3650 | YSTDVRM | 3662 | TATTCTACGGATGTGAGGATGCA |
| 4 | 3651 | IVMNSLK | 3663 | ATTGTTATGAATTCGTTGAAGGC |
| 5 | 3652 | RESPRGL | 3664 | CGGGAGAGTCCTCGTGGGCTGCA |
| 6 | 3653 | SFNDTRA | 3665 | AGTTTTAATGATACTAGGGCTCA |
| 7 | 3654 | GGTLAVVSL | 3666 | GGTGGTACGTTGGCCGTCGTGTCGCTT |
| 8 | 3655 | YGLPKGP | 3667 | TATGGGTTGCCGAAGGGTCCT |
| 9 | 3656 | STGTLRL | 3668 | TCGACTGGGACGCTTCGGCTT |
| 10 | 3657 | YSTDERM | 3669 | TATTCGACGGATGAGAGGATG |
| 11 | 3658 | YSTDERK | 3670 | TATTCGACGGATGAGAGGAAG |
| 12 | 3659 | YVSSVKM | 3671 | TATGTTTCGTCTGTTAAGATG |
| 13 | 314 | PLNGAVHLYAQA | 6 | CCGCTTAATGGTGCCGTCCATCTTTATGCT |
| | | QTGWVPN | | CAGGCGCAGACCGGCTGGGTTCCGAAC |
| 14 | 566 | PLNGAVHLYAQA | 9 | CCGCTGAATGGTGCGGTGCATCTGTATGCG |
| | | QLSPVKN | | CAGGCGCAGCTGTCTCCGGTGAAGAAT |

[0720] In some embodiments, the AAV capsid polypeptide, e.g., the AAV capsid variant, comprises at least 3, 4, 5, 6, 7, 8, or 9 consecutive amino acids from the amino acid sequence of any of SEQ ID NO: 3648-3659. In some embodiments, the amino acid sequence is present in loop VIII. In some embodiments, the amino acid sequence is present immediately subsequent to position 586, 588, or 589, relative to a reference sequence numbered according to the amino acid sequence of SEQ ID NO: 138.

[0721] In some embodiments, the AAV capsid polypeptide, e.g., the AAV capsid variant, comprises an amino acid sequence comprising at least one, two, or three but no more than four modifications, e.g., substitutions, (e.g., conservative substitutions), insertions, or deletions, relative to any of the amino acid sequence of Table 34. In some embodiments, the AAV capsid polypeptide, e.g., the AAV capsid variant, comprises an amino acid sequence comprising at least one, two, or three but no more than four different amino acids, relative to any of the amino acid sequence of Table 34. In some embodiments, the AAV capsid variant comprises an amino acid sequence comprising at least one, two, or three but no more than four modifications, e.g., substitutions, (e.g., conservative substitutions), insertions, or deletions, relative to the amino acid sequence of any of SEQ ID NO: 3648-3659. In some embodiments, the AAV capsid variant comprises an amino acid sequence comprising at least one, two, or three but no more than four different amino acids relative to the amino acid sequence of any of SEQ ID NO: 3648-3659. In some embodiments, the amino acid sequence is present in loop VIII. In some embodiments, the amino acid sequence is present immediately subsequent to position 586, 588, or 589, relative to a reference sequence numbered according to the amino acid sequence of SEQ ID NO: 138.

[0722] In some embodiments, the AAV capsid polypeptide, e.g., the AAV capsid variant, comprises at least 3, 4, 5, 6, 7, 8, or 9 consecutive amino acids from the amino acid sequence of any of SEQ ID NO: 3648-3659. In some embodiments, the 3 consecutive amino acids comprise PLN. In some embodiments, the 4 consecutive amino acids comprise PLNG (SEQ ID NO: 3678). In some embodiments, the 5 consecutive amino acids comprise PLNGA (SEQ ID NO: 3679). In some embodiments, the 6 consecutive amino acids comprise PLNGAV (SEQ ID NO: 3680). In some embodiments, the 7 consecutive amino acids comprise PLNGAVH (SEQ ID NO: 3681). In some embodiments, the 8 consecutive amino acids comprise PLNGAVHL (SEQ ID NO: 3682). In some embodiments, the 9 consecutive amino acids comprise PLNGAVHLY (SEQ ID NO: 3648).

[0723] In some embodiments, the four consecutive amino acids comprise NGAV (SEQ ID NO: 3683). In some embodiments, the four consecutive amino acids comprise GAVH (SEQ ID NO: 3684). In some embodiments, the five consecutive amino acids comprise NGAVH (SEQ ID NO: 3685). In some embodiments, the five consecutive amino acids comprise GAVHL (SEQ ID NO: 3686). In some embodiments, the five consecutive amino acids comprise AVHLY (SEQ ID NO: 3687). In some embodiments, the six consecutive amino acids comprise NGAVHL (SEQ ID NO: 3688). In some embodiments, the seven consecutive amino acids comprise NGAVHLY (SEQ ID NO: 3689).

[0724] In some embodiments, the 3 consecutive amino acids comprise YST. In some embodiments, the 4 consecutive amino acids comprise YSTD (SEQ ID NO: 3690). In some embodiments, the 5 consecutive amino acids comprise YSTDE (SEQ ID NO: 3691). In some embodiments, the 5 consecutive amino acids comprise YSTDV (SEQ ID NO: 3700). In some embodiments, the 6 consecutive amino acids comprise YSTDER (SEQ ID NO: 3692). In some embodiments, the 6 consecutive amino acids comprise YSTDVR (SEQ ID NO: 3701). In some embodiments, the 7 consecutive amino acids comprise YSTDERM (SEQ ID NO: 3657). In some embodiments, the 7 consecutive amino acids comprise YSTDERK (SEQ ID NO: 3658). In some embodiments, the 7 consecutive amino acids comprise YSTDVRM (SEQ ID NO: 3650).

[0725] In some embodiments, the 3 consecutive amino acids comprise IVM. In some embodiments, the 4 consecutive amino acids comprise IVMN (SEQ ID NO: 3693). In some embodiments, the 5 consecutive amino acids comprise IVMNS (SEQ ID NO: 3694). In some embodiments, the 6 consecutive amino acids comprise IVMNSL (SEQ ID NO: 3695). In some embodiments, the 7 consecutive amino acids comprise IVMNSLK (SEQ ID NO: 3651).

[0726] In some embodiments, the AAV capsid polypeptide, e.g., the AAV capsid variant, comprises an amino acid sequence comprising at least one, two, or three but no more than four modifications, e.g., substitutions (e.g., conservative substitutions), relative to the amino acid sequence of any of SEQ ID NO: 3648-3659. In some embodiments, the modification is a conservative substitution.

[0727] In some embodiments, the AAV capsid polypeptide, e.g., the AAV capsid variant, comprises the amino acid sequence of PLNGAVHLY (SEQ ID NO: 3648), an amino acid sequence comprising at least one, two, or three but no more than four modifications, e.g., substitutions (e.g., conservative substitutions), insertions, or deletions, relative to the amino acid sequence of PLNGAVHLY (SEQ ID NO: 3648), or an amino acid sequence comprising at least one, two, or three but no more than four different amino acids relative to the amino acid sequence of PLNGAVHLY (SEQ ID NO: 3648), optionally wherein position 7 is H.

[0728] In some embodiments, the AAV capsid polypeptide, e.g., the AAV capsid variant, comprises the amino acid sequence of RDSPKGW (SEQ ID NO: 3649), an amino acid sequence comprising at least one, two, or three modifications, e.g., substitutions (e.g., conservative substitutions), insertions, or deletions, but no more than four modifications, e.g., substitutions (e.g., conservative substitutions), insertions, or deletions, relative to the amino acid sequence of RDSPKGW (SEQ ID NO: 3649), or an amino acid sequence comprising at least one, two, or three but no more than four different amino acids relative to the amino acid sequence of RDSPKGW (SEQ ID NO: 3649).

[0729] In some embodiments, the AAV capsid polypeptide, e.g., the AAV capsid variant, comprises the amino acid sequence of IVMNSLK (SEQ ID NO: 3651), an amino acid sequence comprising at least one, two, or three modifications, e.g., substitutions (e.g., conservative substitutions), insertions, or deletions, but no more than four modifications, e.g., substitutions (e.g., conservative substitutions), insertions, or deletions, relative to the amino acid sequence of IVMNSLK (SEQ ID NO: 3651), or an amino acid sequence comprising at least one, two, or three but no more than four different amino acids relative to the amino acid sequence of IVMNSLK (SEQ ID NO: 3651).

[0730] In some embodiments, the AAV capsid polypeptide, e.g., the AAV capsid variant, comprises the amino acid sequence of YSTDVRM (SEQ ID NO: 3650), an amino acid sequence comprising at least one, two, or three modifications, e.g., substitutions (e.g., conservative substitutions), insertions, or deletions, but no more than four modifications, e.g., substitutions (e.g., conservative substitutions), insertions, or deletions, relative to the amino acid sequence of YSTDVRM (SEQ ID NO: 3650), or an amino acid sequence comprising at least one, two, or three but no more than four different amino acids relative to the amino acid sequence of YSTDVRM (SEQ ID NO: 3650).

[0731] In some embodiments, the AAV capsid polypeptide, e.g., the AAV capsid variant, comprises the amino acid sequence of RESPRGL (SEQ ID NO: 3652), a sequence comprising at least one, two, or three modifications, e.g., substitutions (e.g., conservative substitutions), insertions, or deletions, but no more than four modifications, e.g., substitutions (e.g., conservative substitutions), insertions, or deletions, relative to the amino acid sequence of RESPRGL (SEQ ID NO: 3652), or an amino acid sequence comprising at least one, two, or three but no more than four different amino acids relative to the amino acid sequence of RESPRGL (SEQ ID NO: 3652).

[0732] In some embodiments, the AAV capsid variant comprises the amino acid sequence of any of SEQ ID NO: 3648-3659. In some embodiments, the amino acid sequence is present in loop VIII of an AAV capsid variant described herein. In some embodiments, the AAV capsid variant comprises the amino acid sequence of SEQ ID NO: 3648. In some embodiments, the AAV capsid variant comprises the amino acid sequence of SEQ ID NO: 3649. In some embodiments, the AAV capsid variant comprises the amino acid sequence of SEQ ID NO: 3651. In some embodiments, the amino acid sequence is present immediately subsequent to position 586, relative to a reference sequence numbered according to the amino acid sequence of SEQ ID NO: 138. In some embodiments, the amino acid sequence is present immediately subsequent to position 588, relative to a reference sequence numbered according to the amino acid sequence of SEQ ID NO: 138. In some embodiments, the amino acid sequence is present immediately subsequent to position 589, relative to a reference sequence numbered according to the amino acid sequence of SEQ ID NO: 138.

[0733] In some embodiments, the AAV capsid polypeptide, e.g., the AAV capsid variant (e.g., an AAV capsid variant described herein), comprises an amino acid sequence encoded by the nucleotide sequence of any one of SEQ ID NOs: 3660-3671, or a nucleotide sequence substantially identical (e.g., having at least 70%, 75%, 80%, 85%, 90%, 92%, 95%, 97%, 98%, or 99% sequence identity) thereto. In some embodiments, the AAV capsid, e.g., an AAV capsid variant described herein, comprises an amino acid sequence encoded by a nucleotide sequence comprising at least one, two, three, four, five, six, or seven modifications, e.g., substitutions (e.g., conservative substitutions), insertions, or deletions, but no more than ten modifications, e.g., substitutions (e.g., conservative substitutions), insertions, or deletions, relative to the nucleotide sequences of any of SEQ ID NOs: 3660-3671. In some embodiments, the AAV capsid polypeptide, e.g., the AAV capsid variant (e.g., an AAV capsid variant described herein), comprises an amino acid sequence encoded by a nucleotide sequence comprising at least one, two, three, four, five, six, or seven, but no more than ten different nucleotides relative to the nucleotide sequence of any of SEQ ID NOs: 3660-3671.

[0734] In some embodiments, the AAV capsid polypeptide, e.g., the AAV capsid variant (e.g., an AAV capsid variant described herein), comprises an amino acid sequence encoded by the nucleotide sequence of any one of SEQ ID NOs: 3660-3671, or a nucleotide sequence substantially identical (e.g., having at least 70%, 75%, 80%, 85%, 90%, 92%, 95%, 97%, 98%, or 99% sequence identity) thereto. In some embodiments, the AAV capsid, e.g., an AAV capsid variant described herein, comprises an amino acid sequence encoded by a nucleotide sequence comprising at least one, two, three, four, five, six, or seven modifications, e.g., substitutions (e.g., conservative substitutions), insertions, or deletions, but no more than ten modifications, e.g., substitutions (e.g., conservative substitutions), insertions, or deletions, relative to the nucleotide sequences of any of SEQ ID NOs: 3660-3671. In some embodiments, the AAV capsid polypeptide, e.g., the AAV capsid variant (e.g., an AAV capsid variant described herein), comprises an amino acid sequence encoded by a nucleotide sequence comprising at least one, two, three, four, five, six, or seven, but no more than ten different nucleotides relative to the nucleotide sequence of any of SEQ ID NOs: 3660-3671.

[0735] In some embodiments, the nucleotide sequence encoding the AAV capsid polypeptide, e.g., the AAV capsid variant (e.g., an AAV capsid variant described herein), comprises the nucleotide sequence of any one of SEQ ID NOs: 3660-3671, or a nucleotide sequence substantially identical (e.g., having at least 70%, 75%, 80%, 85%, 90%, 92%, 95%, 97%, 98%, or 99% sequence identity) thereto. In some embodiments, nucleic acid sequence encoding the AAV capsid variant, e.g., an AAV capsid variant described herein, comprises a nucleotide sequence comprising at least one, two, three, four, five, six, or seven modifications, e.g., substitutions (e.g., conservative substitutions), insertions, or deletions, but no more than ten modifications, e.g., substitutions (e.g., conservative substitutions), insertions, or deletions, of the nucleotide sequences relative to any of SEQ ID NOs: 3660-3671. In some embodiments, the nucleotide sequence encoding the AAV capsid polypeptide, e.g., the AAV capsid variant (e.g., an AAV capsid variant described herein), comprises a nucleotide sequence comprising at least one, two, three, four, five, six, or seven, but no more than ten different nucleotides relative to the nucleotide sequence of any of SEQ ID NOs: 3660-3671.

[0736] In some embodiments, the nucleotide sequence encoding the AAV capsid polypeptide, e.g., the AAV capsid variant (e.g., an AAV capsid variant described herein), comprises the nucleotide sequence of SEQ ID NO: 3660, or a nucleotide sequence substantially identical (e.g., having at least 70%, 75%, 80%, 85%, 90%, 92%, 95%, 97%, 98%, or 99% sequence identity) thereto. In some embodiments, the nucleic acid sequence encoding the AAV capsid variant comprises a nucleotide sequence comprising at least one, two, three, four, five, six, or seven modifications, e.g., substitutions (e.g., conservative substitutions), insertions, or deletions, but no more than ten modifications, e.g., substitutions (e.g., conservative substitutions), insertions, or deletions, relative to the nucleotide sequences of SEQ ID NO: 3660. In some embodiments, the nucleotide sequence encoding the AAV capsid polypeptide, e.g., the AAV capsid variant (e.g., an AAV capsid variant described herein), comprises a nucleotide sequence comprising at least one, two, three, four, five, six, or seven, but no more than ten different nucleotides relative to the nucleotide sequence of SEQ ID NO: 3660.

[0737] In some embodiments, the nucleotide sequence encoding the AAV capsid polypeptide, e.g., the AAV capsid variant (e.g., an AAV capsid variant described herein), comprises the nucleotide sequence of SEQ ID NO: 3663, or a nucleotide sequence substantially identical (e.g., having at least 70%, 75%, 80%, 85%, 90%, 92%, 95%, 97%, 98%, or 99% sequence identity) thereto. In some embodiments, the nucleic acid sequence encoding the AAV capsid variant comprises a nucleotide sequence comprising at least one, two, three, four, five, six, or seven modifications, e.g., substitutions (e.g., conservative substitutions), insertions, or deletions, but no more than ten modifications, e.g., substitutions (e.g., conservative substitutions), insertions, or deletions, of the nucleotide sequences relative to SEQ ID NO: 3663. In some embodiments, the nucleotide sequence encoding the AAV capsid polypeptide, e.g., the AAV capsid variant (e.g., an AAV capsid variant described herein), comprises a nucleotide sequence comprising at least one, two, three, four, five, six, or seven, but no more than ten different nucleotides relative to the nucleotide sequence of SEQ ID NO: 3663.

[0738] In some embodiments, the AAV capsid polypeptide, e.g., the AAV capsid variant, comprises an amino acid residue other than “A” at position 587 and/or an amino acid residue other than “Q” at position 588, numbered according to SEQ ID NO: 138. In some embodiments, the AAV capsid polypeptide, e.g., the AAV capsid variant, comprises one, two, three, or all of an amino acid other than A at position 589, an amino acid other than Q at position 590, an amino acid other than A at position 591, and/or an amino acid other than Q at position 592, relative to a reference sequence numbered according to the amino acid sequence of SEQ ID NO: 138. In some embodiments, the AAV capsid polypeptide, e.g., the AAV capsid variant, comprises one, two, or all of an amino acid other than T at position 593, an amino acid other than G at position 594, and/or an amino acid other than W at position 595, relative to a reference sequence numbered according to the amino acid sequence of SEQ ID NO: 138. In some embodiments, the AAV capsid polypeptide, e.g., the AAV capsid variant, comprises one, two, or all of an amino acid other than V at position 596, an amino acid other than Q at position 597, and/or an amino acid other than N at position 598, relative to a reference sequence numbered according to the amino acid sequence of SEQ ID NO: 138.

[0739] In some embodiments, the AAV capsid polypeptide, e.g., the AAV capsid variant, comprises the amino acid sequence of PLNGAVHLY (SEQ ID NO: 3648) wherein the amino acid sequence of PLNGAVHLY (SEQ ID NO: 3648) is present immediately subsequent to position 586, relative to a reference sequence numbered according to the amino acid sequence of SEQ ID NO: 138.

[0740] In some embodiments, the polypeptide, e.g., the AAV capsid variant, comprises the amino acid sequence of GGTLAVVSL (SEQ ID NO: 3654), wherein the amino acid sequence of GGTLAVVSL (SEQ ID NO: 3654) is present immediately subsequent to position 586, relative to a reference sequence numbered according to the amino acid sequence of SEQ ID NO: 138.

[0741] In some embodiments, the AAV capsid polypeptide, e.g., the AAV capsid variant, comprises the amino acid sequence of IVMNSLK (SEQ ID NO: 3651), wherein the amino acid sequence of IVMNSLK (SEQ ID NO: 3651) is present immediately subsequent to position 588, relative to a reference sequence numbered according to the amino acid sequence of SEQ ID NO: 138.

[0742] In some embodiments, the AAV capsid polypeptide, e.g., the AAV capsid variant, comprises the amino acid sequence of any of SEQ ID NOs: 3649, 3650, 3652, 3653, or 3655-3659, wherein the amino acid sequence of any of the aforesaid sequences is present immediately subsequent to position 589, relative to a reference sequence numbered according to the amino acid sequence of SEQ ID NO: 138.

[0743] In some embodiments, the AAV capsid polypeptide, e.g., the AAV capsid variant, further comprises a substitution at position K449, e.g., a K449R substitution, numbered according to SEQ ID NO: 138. In some embodiments, the AAV capsid variant further comprises a modification, e.g., an insertion, substitution, and/or deletion in loop I, II, IV, and/or VI.

[0744] In some embodiments, the AAV capsid polypeptide, e.g., the AAV capsid variant, comprises one, two, three, or all of an amino acid other than A at position 589, an amino acid other than Q at position 590, an amino acid other than A at position 591, and/or an amino acid other than Q at position 592, relative to a reference sequence numbered according to the amino acid sequence of SEQ ID NO: 138. In some embodiments, the AAV capsid polypeptide, e.g., the AAV capsid variant, comprises one, two, or all of an amino acid other than T at position 593, an amino acid other than G at position 594, and/or an amino acid other than W at position 595, relative to a reference sequence numbered according to the amino acid sequence of SEQ ID NO: 138. In some embodiments, the AAV capsid polypeptide, e.g., the AAV capsid variant, comprises one, two, or all of an amino acid other than V at position 596, an amino acid other than Q at position 597, and/or an amino acid other than N at position 598, relative to a reference sequence numbered according to the amino acid sequence of SEQ ID NO: 138. In some embodiments, the AAV capsid variant further comprises the amino acid sequence of SEQ ID NO: 138, or an amino acid sequence with at least 80% (e.g., at least about 85, 90, 95, 96, 97, 98, or 99%) sequence identity thereto. In some embodiments, the AAV capsid variant further comprises an amino acid sequence encoded by the nucleotide sequence of SEQ ID NO: 137, or a sequence with at least 80% (e.g., at least about 85, 90, 95, 96, 97, 98, or 99%) sequence identity thereto.

[0745] In some embodiments, an AAV capsid polypeptide, e.g., the AAV capsid variant, comprises immediately subsequent to position 586, 588, or 589, numbered relative to SEQ ID NO: 138 or corresponding to equivalent positions in any other AAV serotype (e.g., AAV1, AAV2, AAV3, AAV3b, AAV4, AAV5, AAV6, AAV7, AAV8, AAVrh8, AAVrh10, AAVrh32.33, AAVrh74, SEQ ID NO: 1, SEQ ID NO: 11, PHP.N, PHP.B, or an AAV serotype as provided in Table 6 of WO 2021/230987 (the contents of which are hereby incorporated by reference in their entirety)), at least 3, 4, 5, 6, 7, 8, 9, 10, 11, 12, 13, 14, 15, 16, 17, 18, or 19 consecutive amino acids of any of amino acid sequence provided in Tables 33, 34, 41, or 42. In some embodiments, the at least 3, 4, 5, 6, 7, 8, 9, 10, 11, 12, 13, 14, 15, 16, 17, 18, or 19 consecutive amino acids of any of amino acid sequence provided in Tables 33, 34, 41, or 42 replaces at least one, two, three, four, five, six, seven, eight, nine, ten, elven, or all of positions A587, Q588, A589, Q590, A591, Q592, T593, G594, W595, V596, Q597, and/or N598, numbered according to SEQ ID NO: 138 or corresponding to equivalent positions in any other AAV serotype (e.g., AAV1, AAV2, AAV3, AAV3b, AAV4, AAV5, AAV6, AAV7, AAV8, AAVrh8, AAVrh10, AAVrh32.33, AAVrh74, SEQ ID NO: 1, SEQ ID NO: 11, PHP.N, PHP.B, or an AAV serotype as provided in Table 6 of WO 2021/230987 (the contents of which are hereby incorporated by reference in their entirety). In some embodiments, the at least 3, 4, 5, 6, 7, 8, 9, 10, 11, 12, 13, 14, 15, 16, 17, 18, or 19 consecutive amino acids of any of amino acid sequence provided in Tables 33, 34, 41, or 42 replaces positions A587, Q588, or both positions A587 and Q588, numbered according to SEQ ID NO: 138 or corresponding to equivalent positions in any other AAV serotype (e.g., AAV1, AAV2, AAV3, AAV3b, AAV4, AAV5, AAV6, AAV7, AAV8, AAVrh8, AAVrh10, AAVrh32.33, AAVrh74, SEQ ID NO: 1, SEQ ID NO: 11, PHP.N, PHP.B, or an AAV serotype as provided in Table 6 of WO 2021/230987 (the contents of which are hereby incorporated by reference in their entirety). In some embodiments, the AAV capsid variant comprises an amino acid other than the wild-type, e.g., native, amino acid, at one, two, three, four, five, six, seven, eight, nine, ten, eleven or all of positions A587, Q588, A589, Q590, A591, Q592, T593, G594, W595, V596, Q597, and/or N598, numbered according to SEQ ID NO: 138 or corresponding to equivalent positions in any other AAV serotype (e.g., AAV1, AAV2, AAV3, AAV3b, AAV4, AAV5, AAV6, AAV7, AAV8, AAVrh8, AAVrh10, AAVrh32.33, AAVrh74, SEQ ID NO: 1, SEQ ID NO: 11, PHP.N, PHP.B, or an AAV serotype as provided in Table 6 of WO 2021/230987 (the contents of which are hereby incorporated by reference in their entirety). In some embodiments, the AAV capsid variant comprises an amino acid other than the wild-type, e.g., native, amino acid, at position A587, Q588, or both positions A587 and Q588, numbered according to SEQ ID NO: 138 or corresponding to equivalent positions in any other AAV serotype (e.g., AAV1, AAV2, AAV3, AAV3b, AAV4, AAV5, AAV6, AAV7, AAV8, AAVrh8, AAVrh10, AAVrh32.33, AAVrh74, SEQ ID NO: 1, SEQ ID NO: 11, PHP.N, PHP.B, or an AAV serotype as provided in Table 6 of WO 2021/230987 (the contents of which are hereby incorporated by reference in their entirety)). In some embodiments, the AAV capsid variant comprises a modification, e.g., substitution, at one, two, three, four, five, six, seven, eight, nine, ten eleven or all of positions A587, Q588, A589, Q590, A591, Q592, T593, G594, W595, V596, Q597, and/or N598, numbered according to SEQ ID NO: 138 or corresponding to equivalent positions in any other AAV serotype (e.g., AAV1, AAV2, AAV3, AAV3b, AAV4, AAV5, AAV6, AAV7, AAV8, AAVrh8, AAVrh10, AAVrh32.33, AAVrh74, SEQ ID NO: 1, SEQ ID NO: 11, PHP.N, PHP.B, or an AAV serotype as provided in Table 6 of WO 2021/230987 (the contents of which are hereby incorporated by reference in their entirety). In some embodiments, the AAV capsid variant comprises a modification, e.g., substitution, at position A587, Q588, or both positions A587 and Q588, numbered according to SEQ ID NO: 138 or corresponding to equivalent positions in any other AAV serotype (e.g., AAV1, AAV2, AAV3, AAV3b, AAV4, AAV5, AAV6, AAV7, AAV8, AAVrh8, AAVrh10, AAVrh32.33, AAVrh74, SEQ ID NO: 1, SEQ ID NO: 11, PHP.N, PHP.B, or an AAV serotype as provided in Table 6 of WO 2021/230987 (the contents of which are hereby incorporated by reference in their entirety).

[0746] In some embodiments, an AAV capsid polypeptide, e.g., an AAV capsid variant, of the present disclosure comprises an amino acid sequence as described herein, e.g. an amino acid sequence of an AAV capsid variant chosen from TTD-001, TTD-002, TTD-003, TTD-004, TTD-005, TTD-006, TTD-007, TTD-008, TTD-009, TTD-010, TTD-011, or TTD-012, e.g., as described in Tables 37 and 38.

[0747] In some embodiments, an AAV capsid polypeptide, e.g. the AAV capsid variant, comprises a VP1, VP2, and/or VP3 protein comprising an amino acid sequence described herein, e.g. an amino acid sequence of an AAV capsid variant chosen from TTD-001, TTD-002, TTD-003, TTD-004, TTD-005, TTD-006, TTD-007, TTD-008, TTD-009, TTD-010, TTD-011, or TTD-012, e.g., as described in Tables 37 and 38.

[0748] In some embodiments, an AAV capsid polypeptide, e.g., the AAV capsid variant, comprises an amino acid sequence encoded by a nucleotide sequence as described herein, e.g. a nucleotide sequence of an AAV capsid variant chosen from TTD-001, TTD-002, TTD-003, TTD-004, TTD-005, TTD-006, TTD-007, TTD-008, TTD-009, TTD-010, TTD-011, or TTD-012, e.g., as described in Tables 37 and 39.

[0749] In some embodiments, a polynucleotide encoding an AAV capsid polypeptide, e.g., an AAV capsid variant, of the present disclosure comprises a nucleotide sequence described herein, e.g. a nucleotide sequence of an AAV capsid variant chosen from TTD-001, TTD-002, TTD-003, TTD-004, TTD-005, TTD-006, TTD-007, TTD-008, TTD-009, TTD-010, TTD-011, or TTD-012, e.g., as described in Tables 37 and 39.

[0750] In some embodiments, insertion of a nucleic acid sequence, targeting nucleic acid sequence, or a peptide into a parent AAV sequence generates the non-limiting exemplary full length capsid sequences, e.g., an AAV capsid polypeptide, e.g., an AAV capsid variant, as described in Tables 37, 38, and 39.

TABLE 37
Exemplary full length capsid sequences (VP1 with insert)

| | VP1 DNA | VP1 PRT | Peptide PRT | Peptide DNA |
|---|---|---|---|---|
| Serotype | SEQ ID NO: | SEQ ID NO: | SEQ ID NO: | SEQ ID NO: |
| TTD-001 | 3623 | 3636 | 3648 | 3660 |
| TTD-002 | 3624 or 3625 | 3637 | 3649 | 3661 |
| TTD-003 | 3626 | 3638 | 3650 | 3662 |
| TTD-004 | 3627 | 3639 | 3651 | 3663 |
| TTD-005 | 3628 | 3640 | 3652 | 3664 |
| TTD-006 | 3629 | 3641 | 3653 | 3665 |
| TTD-007 | 3630 | 3642 | 3654 | 3666 |
| TTD-008 | 3631 | 3643 | 3655 | 3667 |
| TTD-009 | 3632 | 3644 | 3656 | 3668 |
| TTD-010 | 3633 | 3645 | 3657 | 3669 |
| TTD-011 | 3634 | 3646 | 3658 | 3670 |
| TTD-012 | 3635 | 3647 | 3659 | 3671 |
| TTD-013 | 4 | 5 | 314 | 6 |
| TTD-014 | 7 | 8 | 566 | 9 |

TABLE 38
Exemplary full length capsid amino acid sequences

| | SEQ | |
|---|---|---|
| Name and | ID | |
| Annotation | NO: | Amino Acid Sequence |
| TTD-001 | 3636 | MAADGYLPDWLEDNLSEGIREWWALKPGAPQPKANQQHQDNARGLVLPG |
| 9 mer peptide | | YKYLGPGNGLDKGEPVNAADAAALEHDKAYDQQLKAGDNPYLKYNHADA |
| underlined, starts at | | EFQERLKEDTSFGGNLGRAVFQAKKRLLEPLGLVEEAAKTAPGKKRPVE |
| position 587 | | QSPQEPDSSAGIGKSGAQPAKKRLNFGQTGDTESVPDPQPIGEPPAAPS |
| (immediately | | GVGSLTMASGGGAPVADNNEGADGVGSSSGNWHCDSQWLGDRVITTSTR |
| subsequent to | | TWALPTYNNHLYKQISNSTSGGSSNDNAYFGYSTPWGYFDFNRFHCHFS |
| position 586); | | PRDWQRLINNNWGFRPKRLNFKLFNIQVKEVTDNNGVKTIANNLTSTVQ |
| 743 aa | | VFTDSDYQLPYVLGSAHEGCLPPFPADVFMIPQYGYLTLNDGSQAVGRS |
| | | SFYCLEYFPSQMLRTGNNFQFSYEFENVPFHSSYAHSQSLDRLMNPLID |
| | | QYLYYLSKTINGSGQNQQTLKFSVAGPSNMAVOGRNYIPGPSYRQQRVS |
| | | TTVTQNNNSEFAWPGASSWALNGRNSLMNPGPAMASHKEGEDRFFPLSG |
| | | SLIFGKQGTGRDNVDADKVMITNEEEIKTTNPVATESYGQVATNHQSPL |
| | | NGAVHLYAQAQTGWVQNQGILPGMVWQDRDVYLQGPIWAKIPHTDGNFH |
| | | PSPLMGGFGMKHPPPQILIKNTPVPADPPTAFNKDKLNSFITQYSTGQV |
| | | SVEIEWELQKENSKRWNPEIQYTSNYYKSNNVEFAVNTEGVYSEPRPIG |
| | | TRYLTRNL |
| TTD-002 | 3637 | MAADGYLPDWLEDNLSEGIREWWALKPGAPQPKANQQHQDNARGLVLPG |
| 7 mer peptide | | YKYLGPGNGLDKGEPVNAADAAALEHDKAYDQQLKAGDNPYLKYNHADA |
| underlined, starts at | | EFQERLKEDTSFGGNLGRAVFQAKKRLLEPLGLVEEAAKTAPGKKRPVE |
| position 590 | | QSPQEPDSSAGIGKSGAQPAKKRLNFGQTGDTESVPDPQPIGEPPAAPS |
| (immediately | | GVGSLTMASGGGAPVADNNEGADGVGSSSGNWHCDSQWLGDRVITTSTR |
| subsequent to | | TWALPTYNNHLYKQISNSTSGGSSNDNAYFGYSTPWGYFDFNRFHCHFS |
| position 589); | | PRDWQRLINNNWGFRPKRLNFKLFNIQVKEVTDNNGVKTIANNLTSTVQ |
| 743 aa | | VFTDSDYQLPYVLGSAHEGCLPPFPADVFMIPQYGYLTLNDGSQAVGRS |
| | | SFYCLEYFPSQMLRTGNNFQFSYEFENVPFHSSYAHSQSLDRLMNPLID |
| | | QYLYYLSKTINGSGQNQQTLKFSVAGPSNMAVOGRNYIPGPSYRQQRVS |
| | | TTVTQNNNSEFAWPGASSWALNGRNSLMNPGPAMASHKEGEDRFFPLSG |
| | | SLIFGKQGTGRDNVDADKVMITNEEEIKTTNPVATESYGQVATNHQSAQ |
| | | ARDSPKGWQAQTGWVQNQGILPGMVWQDRDVYLQGPIWAKIPHTDGNFH |
| | | PSPLMGGFGMKHPPPQILIKNTPVPADPPTAFNKDKLNSFITQYSTGQV |
| | | SVEIEWELQKENSKRWNPEIQYTSNYYKSNNVEFAVNTEGVYSEPRPIG |
| | | TRYLTRNL |
| TTD-003 | 3638 | MAADGYLPDWLEDNLSEGIREWWALKPGAPQPKANQQHQDNARGLVLPG |
| 7 mer peptide | | YKYLGPGNGLDKGEPVNAADAAALEHDKAYDQQLKAGDNPYLKYNHADA |
| underlined, starts at | | EFQERLKEDTSFGGNLGRAVFQAKKRLLEPLGLVEEAAKTAPGKKRPVE |
| position 590 | | QSPQEPDSSAGIGKSGAQPAKKRLNFGQTGDTESVPDPQPIGEPPAAPS |
| (immediately | | GVGSLTMASGGGAPVADNNEGADGVGSSSGNWHCDSQWLGDRVITTSTR |
| subsequent to | | TWALPTYNNHLYKQISNSTSGGSSNDNAYFGYSTPWGYFDFNRFHCHFS |
| position 589); | | PRDWQRLINNNWGFRPKRLNFKLFNIQVKEVTDNNGVKTIANNLTSTVQ |
| 743 aa | | VFTDSDYQLPYVLGSAHEGCLPPFPADVFMIPQYGYLTLNDGSQAVGRS |
| | | SFYCLEYFPSQMLRTGNNFQFSYEFENVPFHSSYAHSQSLDRLMNPLID |
| | | QYLYYLSKTINGSGQNQQTLKFSVAGPSNMAVOGRNYIPGPSYRQQRVS |
| | | TTVTQNNNSEFAWPGASSWALNGRNSLMNPGPAMASHKEGEDRFFPLSG |
| | | SLIFGKQGTGRDNVDADKVMITNEEEIKTTNPVATESYGQVATNHQSAQ |
| | | AYSTDVRMQAQTGWVQNQGILPGMVWQDRDVYLQGPIWAKIPHTDGNFH |
| | | PSPLMGGFGMKHPPPQILIKNTPVPADPPTAFNKDKINSFITQYSTGQV |
| | | SVEIEWELQKENSKRWNPEIQYTSNYYKSNNVEFAVNTEGVYSEPRPIG |
| | | TRYLTRNL |
| TTD-004 | 3639 | MAADGYLPDWLEDNLSEGIREWWALKPGAPQPKANQQHQDNARGLVLPG |
| 7 mer peptide | | YKYLGPGNGLDKGEPVNAADAAALEHDKAYDQQLKAGDNPYLKYNHADA |
| underlined, starts at | | EFQERLKEDTSFGGNLGRAVFQAKKRLLEPLGLVEEAAKTAPGKKRPVE |
| position 589 | | QSPQEPDSSAGIGKSGAQPAKKRLNFGQTGDTESVPDPQPIGEPPAAPS |
| (immediately | | GVGSLTMASGGGAPVADNNEGADGVGSSSGNWHCDSQWLGDRVITTSTR |
| subsequent to | | TWALPTYNNHLYKQISNSTSGGSSNDNAYFGYSTPWGYFDFNRFHCHFS |
| position 588); | | PRDWQRLINNNWGFRPKRLNFKLFNIQVKEVTDNNGVKTIANNLTSTVQ |
| 743 aa | | VFTDSDYQLPYVLGSAHEGCLPPFPADVFMIPQYGYLTLNDGSQAVGRS |
| | | SFYCLEYFPSQMLRTGNNFQFSYEFENVPFHSSYAHSQSLDRLMNPLID |
| | | QYLYYLSKTINGSGQNQQTLKFSVAGPSNMAVOGRNYIPGPSYRQQRVS |
| | | TTVTQNNNSEFAWPGASSWALNGRNSLMNPGPAMASHKEGEDRFFPLSG |
| | | SLIFGKQGTGRDNVDADKVMITNEEEIKTTNPVATESYGQVATNHQSAQ |
| | | IVMNSLKAQAQTGWVQNQGILPGMVWQDRDVYLQGPIWAKIPHTDGNFH |
| | | PSPLMGGFGMKHPPPQILIKNTPVPADPPTAFNKDKLNSFITQYSTGQV |
| | | SVEIEWELQKENSKRWNPEIQYTSNYYKSNNVEFAVNTEGVYSEPRPIG |
| | | TRYLTRNL |
| TTD-005 | 3640 | MAADGYLPDWLEDNLSEGIREWWALKPGAPQPKANQQHQDNARGLVLPG |
| 7 mer peptide | | YKYLGPGNGLDKGEPVNAADAAALEHDKAYDQQLKAGDNPYLKYNHADA |
| underlined, starts at | | EFQERLKEDTSFGGNLGRAVFQAKKRLLEPLGLVEEAAKTAPGKKRPVE |
| position 590 | | QSPQEPDSSAGIGKSGAQPAKKRLNFGQTGDTESVPDPQPIGEPPAAPS |
| (immediately | | GVGSLTMASGGGAPVADNNEGADGVGSSSGNWHCDSQWLGDRVITTSTR |
| subsequent to | | TWALPTYNNHLYKQISNSTSGGSSNDNAYFGYSTPWGYFDFNRFHCHFS |
| position 589); | | PRDWQRLINNNWGFRPKRLNFKLFNIQVKEVTDNNGVKTIANNLTSTVQ |
| 743 aa | | VFTDSDYQLPYVLGSAHEGCLPPFPADVFMIPQYGYLTLNDGSQAVGRS |
| | | SFYCLEYFPSQMLRTGNNFQFSYEFENVPFHSSYAHSQSLDRLMNPLID |
| | | QYLYYLSKTINGSGQNQQTLKFSVAGPSNMAVQGRNYIPGPSYRQQRVS |
| | | TTVTQNNNSEFAWPGASSWALNGRNSLMNPGPAMASHKEGEDRFFPLSG |
| | | SLIFGKQGTGRDNVDADKVMITNEEEIKTTNPVATESYGQVATNHQSAQ |
| | | ARESPRGLQAQTGWVQNQGILPGMVWQDRDVYLQGPIWAKIPHTDGNFH |
| | | PSPLMGGFGMKHPPPQILIKNTPVPADPPTAFNKDKLNSFITQYSTGQV |
| | | SVEIEWELQKENSKRWNPEIQYTSNYYKSNNVEFAVNTEGVYSEPRPIG |
| | | TRYLTRNL |
| TTD-006 | 3641 | MAADGYLPDWLEDNLSEGIREWWALKPGAPQPKANQQHQDNARGLVLPG |
| 7 mer peptide | | YKYLGPGNGLDKGEPVNAADAAALEHDKAYDQQLKAGDNPYLKYNHADA |
| underlined, starts at | | EFQERLKEDTSFGGNLGRAVFQAKKRLLEPLGLVEEAAKTAPGKKRPVE |
| position 590 | | QSPQEPDSSAGIGKSGAQPAKKRLNFGQTGDTESVPDPQPIGEPPAAPS |
| (immediately | | GVGSLTMASGGGAPVADNNEGADGVGSSSGNWHCDSQWLGDRVITTSTR |
| subsequent to 589); | | TWALPTYNNHLYKQISNSTSGGSSNDNAYFGYSTPWGYFDFNRFHCHFS |
| 743 aa | | PRDWQRLINNNWGFRPKRLNFKLFNIQVKEVTDNNGVKTIANNLTSTVQ |
| | | VFTDSDYQLPYVLGSAHEGCLPPFPADVFMIPQYGYLTLNDGSQAVGRS |
| | | SFYCLEYFPSQMLRTGNNFQFSYEFENVPFHSSYAHSQSLDRLMNPLID |
| | | QYLYYLSKTINGSGQNQQTLKFSVAGPSNMAVOGRNYIPGPSYRQQRVS |
| | | TTVTQNNNSEFAWPGASSWALNGRNSLMNPGPAMASHKEGEDRFFPLSG |
| | | SLIFGKQGTGRDNVDADKVMITNEEEIKTTNPVATESYGQVATNHQSAQ |
| | | ASFNDTRAQAQTGWVQNQGILPGMVWQDRDVYLQGPIWAKIPHTDGNFH |
| | | PSPLMGGFGMKHPPPQILIKNTPVPADPPTAFNKDKINSFITQYSTGQV |
| | | SVEIEWELQKENSKRWNPEIQYTSNYYKSNNVEFAVNTEGVYSEPRPIG |
| | | TRYLTRNL |
| TTD-007 | 3642 | MAADGYLPDWLEDNLSEGIREWWALKPGAPQPKANQQHQDNARGLVLPG |
| 9 mer peptide | | YKYLGPGNGLDKGEPVNAADAAALEHDKAYDQQLKAGDNPYLKYNHADA |
| underlined, starts at | | EFQERLKEDTSFGGNLGRAVFQAKKRLLEPLGLVEEAAKTAPGKKRPVE |
| position 587 | | QSPQEPDSSAGIGKSGAQPAKKRLNFGQTGDTESVPDPQPIGEPPAAPS |
| (immediately | | GVGSLTMASGGGAPVADNNEGADGVGSSSGNWHCDSQWLGDRVITTSTR |
| subsequent to | | TWALPTYNNHLYKQISNSTSGGSSNDNAYFGYSTPWGYFDFNRFHCHFS |
| position 586); | | PRDWQRLINNNWGFRPKRLNFKLFNIQVKEVTDNNGVKTIANNLTSTVQ |
| 743 aa | | VFTDSDYQLPYVLGSAHEGCLPPFPADVFMIPQYGYLTLNDGSQAVGRS |
| | | SFYCLEYFPSQMLRTGNNFQFSYEFENVPFHSSYAHSQSLDRLMNPLID |
| | | QYLYYLSKTINGSGONQQTLKFSVAGPSNMAVOGRNYIPGPSYRQQRVS |
| | | TTVTQNNNSEFAWPGASSWALNGRNSLMNPGPAMASHKEGEDRFFPLSG |
| | | SLIFGKQGTGRDNVDADKVMITNEEEIKTTNPVATESYGQVATNHQSGG |
| | | TLAVVSLAQAQTGWVQNQGILPGMVWQDRDVYLQGPIWAKIPHTDGNFH |
| | | PSPLMGGFGMKHPPPQILIKNTPVPADPPTAFNKDKLNSFITQYSTGQV |
| | | SVEIEWELQKENSKRWNPEIQYTSNYYKSNNVEFAVNTEGVYSEPRPIG |
| | | TRYLTRNL |
| TTD-008 | 3643 | MAADGYLPDWLEDNLSEGIREWWALKPGAPQPKANQQHQDNARGLVLPG |
| 7 mer peptide | | YKYLGPGNGLDKGEPVNAADAAALEHDKAYDQQLKAGDNPYLKYNHADA |
| underlined, starts at | | EFQERLKEDTSFGGNLGRAVFQAKKRLLEPLGLVEEAAKTAPGKKRPVE |
| position 590 | | QSPQEPDSSAGIGKSGAQPAKKRLNFGQTGDTESVPDPQPIGEPPAAPS |
| (immediately | | GVGSLTMASGGGAPVADNNEGADGVGSSSGNWHCDSQWLGDRVITTSTR |
| subsequent to 589); | | TWALPTYNNHLYKQISNSTSGGSSNDNAYFGYSTPWGYFDFNRFHCHFS |
| 743 aa | | PRDWQRLINNNWGFRPKRLNFKLFNIQVKEVTDNNGVKTIANNLTSTVQ |
| | | VFTDSDYQLPYVLGSAHEGCLPPFPADVFMIPQYGYLTLNDGSQAVGRS |
| | | SFYCLEYFPSQMLRTGNNFQFSYEFENVPFHSSYAHSQSLDRLMNPLID |
| | | QYLYYLSKTINGSGQNQQTLKFSVAGPSNMAVQGRNYIPGPSYRQQRVS |
| | | TTVTQNNNSEFAWPGASSWALNGRNSLMNPGPAMASHKEGEDRFFPLSG |
| | | SLIFGKQGTGRDNVDADKVMITNEEEIKTTNPVATESYGQVATNHQSAQ |
| | | AYGLPKGPQAQTGWVQNQGILPGMVWQDRDVYLQGPIWAKIPHTDGNFH |
| | | PSPLMGGFGMKHPPPQILIKNTPVPADPPTAFNKDKLNSFITQYSTGQV |
| | | SVEIEWELQKENSKRWNPEIQYTSNYYKSNNVEFAVNTEGVYSEPRPIG |
| | | TRYLTRNL |
| TTD-009 | 3644 | MAADGYLPDWLEDNLSEGIREWWALKPGAPQPKANQQHQDNARGLVLPG |
| 7 mer peptide | | YKYLGPGNGLDKGEPVNAADAAALEHDKAYDQQLKAGDNPYLKYNHADA |
| underlined, starts at | | EFQERLKEDTSFGGNLGRAVFQAKKRLLEPLGLVEEAAKTAPGKKRPVE |
| position 590 | | QSPQEPDSSAGIGKSGAQPAKKRLNFGQTGDTESVPDPQPIGEPPAAPS |
| (immediately | | GVGSLTMASGGGAPVADNNEGADGVGSSSGNWHCDSQWLGDRVITTSTR |
| subsequent to 589); | | TWALPTYNNHLYKQISNSTSGGSSNDNAYFGYSTPWGYFDFNRFHCHFS |
| 743 aa | | PRDWQRLINNNWGFRPKRLNFKLFNIQVKEVTDNNGVKTIANNLTSTVQ |
| | | VFTDSDYQLPYVLGSAHEGCLPPFPADVFMIPQYGYLTLNDGSQAVGRS |
| | | SFYCLEYFPSQMLRTGNNFQFSYEFENVPFHSSYAHSQSLDRLMNPLID |
| | | QYLYYLSKTINGSGQNQQTLKFSVAGPSNMAVOGRNYIPGPSYRQQRVS |
| | | TTVTQNNNSEFAWPGASSWALNGRNSLMNPGPAMASHKEGEDRFFPLSG |
| | | SLIFGKQGTGRDNVDADKVMITNEEEIKTTNPVATESYGQVATNHQSAQ |
| | | ASTGTLRLQAQTGWVQNQGILPGMVWQDRDVYLQGPIWAKIPHTDGNFH |
| | | PSPLMGGFGMKHPPPQILIKNTPVPADPPTAFNKDKLNSFITQYSTGQV |
| | | SVEIEWELQKENSKRWNPEIQYTSNYYKSNNVEFAVNTEGVYSEPRPIG |
| | | TRYLTRNL |
| TTD-010 | 3645 | MAADGYLPDWLEDNLSEGIREWWALKPGAPQPKANQQHQDNARGLVLPG |
| 7 mer peptide | | YKYLGPGNGLDKGEPVNAADAAALEHDKAYDQQLKAGDNPYLKYNHADA |
| underlined, starts at | | EFQERLKEDTSFGGNLGRAVFQAKKRLLEPLGLVEEAAKTAPGKKRPVE |
| position 590 | | QSPQEPDSSAGIGKSGAQPAKKRLNFGQTGDTESVPDPQPIGEPPAAPS |
| (immediately | | GVGSLTMASGGGAPVADNNEGADGVGSSSGNWHCDSQWLGDRVITTSTR |
| subsequent to 589); | | TWALPTYNNHLYKQISNSTSGGSSNDNAYFGYSTPWGYFDFNRFHCHFS |
| 743 aa | | PRDWQRLINNNWGFRPKRLNFKLFNIQVKEVTDNNGVKTIANNLTSTVQ |
| | | VFTDSDYQLPYVLGSAHEGCLPPFPADVFMIPQYGYLTLNDGSQAVGRS |
| | | SFYCLEYFPSQMLRTGNNFQFSYEFENVPFHSSYAHSQSLDRLMNPLID |
| | | QYLYYLSKTINGSGQNQQTLKFSVAGPSNMAVQGRNYIPGPSYRQQRVS |
| | | TTVTQNNNSEFAWPGASSWALNGRNSLMNPGPAMASHKEGEDRFFPLSG |
| | | SLIFGKQGTGRDNVDADKVMITNEEEIKTTNPVATESYGQVATNHQSAQ |
| | | AYSTDERMQAQTGWVQNQGILPGMVWQDRDVYLQGPIWAKIPHTDGNFH |
| | | PSPLMGGFGMKHPPPQILIKNTPVPADPPTAFNKDKLNSFITQYSTGQV |
| | | SVEIEWELQKENSKRWNPEIQYTSNYYKSNNVEFAVNTEGVYSEPRPIG |
| | | TRYLTRNL |
| TTD-011 | 3646 | MAADGYLPDWLEDNLSEGIREWWALKPGAPQPKANQQHQDNARGLVLPG |
| 7 mer peptide | | YKYLGPGNGLDKGEPVNAADAAALEHDKAYDQQLKAGDNPYLKYNHADA |
| underlined, starts at | | EFQERLKEDTSFGGNLGRAVFQAKKRLLEPLGLVEEAAKTAPGKKRPVE |
| position 590 | | QSPQEPDSSAGIGKSGAQPAKKRLNFGQTGDTESVPDPQPIGEPPAAPS |
| (immediately | | GVGSLTMASGGGAPVADNNEGADGVGSSSGNWHCDSQWLGDRVITTSTR |
| subsequent to 589); | | TWALPTYNNHLYKQISNSTSGGSSNDNAYFGYSTPWGYFDFNRFHCHFS |
| 743 aa | | PRDWQRLINNNWGFRPKRLNFKLFNIQVKEVTDNNGVKTIANNLTSTVQ |
| | | VFTDSDYQLPYVLGSAHEGCLPPFPADVFMIPQYGYLTLNDGSQAVGRS |
| | | SFYCLEYFPSQMLRTGNNFQFSYEFENVPFHSSYAHSQSLDRLMNPLID |
| | | QYLYYLSKTINGSGQNQQTLKFSVAGPSNMAVQGRNYIPGPSYRQQRVS |
| | | TTVTQNNNSEFAWPGASSWALNGRNSLMNPGPAMASHKEGEDRFFPLSG |
| | | SLIFGKQGTGRDNVDADKVMITNEEEIKTTNPVATESYGQVATNHQSAQ |
| | | AYSTDERKQAQTGWVQNQGILPGMVWQDRDVYLQGPIWAKIPHTDGNFH |
| | | PSPLMGGFGMKHPPPQILIKNTPVPADPPTAFNKDKLNSFITQYSTGQV |
| | | SVEIEWELQKENSKRWNPEIQYTSNYYKSNNVEFAVNTEGVYSEPRPIG |
| | | TRYLTRNL |
| TTD-012 | 3647 | MAADGYLPDWLEDNLSEGIREWWALKPGAPQPKANQQHQDNARGLVLPG |
| 7 mer peptide | | YKYLGPGNGLDKGEPVNAADAAALEHDKAYDQQLKAGDNPYLKYNHADA |
| underlined, starts at | | EFQERLKEDTSFGGNLGRAVFQAKKRLLEPLGLVEEAAKTAPGKKRPVE |
| position 590 | | QSPQEPDSSAGIGKSGAQPAKKRLNFGQTGDTESVPDPQPIGEPPAAPS |
| (immediately | | GVGSLTMASGGGAPVADNNEGADGVGSSSGNWHCDSQWLGDRVITTSTR |
| subsequent to 589); | | TWALPTYNNHLYKQISNSTSGGSSNDNAYFGYSTPWGYFDFNRFHCHFS |
| 743 aa | | PRDWQRLINNNWGFRPKRLNFKLFNIQVKEVTDNNGVKTIANNLTSTVQ |
| | | VFTDSDYQLPYVLGSAHEGCLPPFPADVFMIPQYGYLTLNDGSQAVGRS |
| | | SFYCLEYFPSQMLRTGNNFQFSYEFENVPFHSSYAHSQSLDRLMNPLID |
| | | QYLYYLSKTINGSGQNQQTLKFSVAGPSNMAVOGRNYIPGPSYRQQRVS |
| | | TTVTQNNNSEFAWPGASSWALNGRNSLMNPGPAMASHKEGEDRFFPLSG |
| | | SLIFGKQGTGRDNVDADKVMITNEEEIKTTNPVATESYGQVATNHQSAQ |
| | | AYVSSVKMQAQTGWVQNQGILPGMVWQDRDVYLQGPIWAKIPHTDGNFH |
| | | PSPLMGGFGMKHPPPQILIKNTPVPADPPTAFNKDKLNSFITQYSTGQV |
| | | SVEIEWELQKENSKRWNPEIQYTSNYYKSNNVEFAVNTEGVYSEPRPIG |
| | | TRYLTRNL |
| TTD-013 | 5 | MAADGYLPDWLEDNLSEGIREWWALKPGAPQPKANQQHQDNARGLVLPG |
| 9 mer peptide | | YKYLGPGNGLDKGEPVNAADAAALEHDKAYDQQLKAGDNPYLKYNHADA |
| underlined, starts at | | EFQERLKEDTSFGGNLGRAVFQAKKRLLEPLGLVEEAAKTAPGKKRPVE |
| position 587 | | QSPQEPDSSAGIGKSGAQPAKKRLNFGQTGDTESVPDPQPIGEPPAAPS |
| (immediately | | GVGSLTMASGGGAPVADNNEGADGVGSSSGNWHCDSQWLGDRVITTSTR |
| subsequent to | | TWALPTYNNHLYKQISNSTSGGSSNDNAYFGYSTPWGYFDFNRFHCHFS |
| position 586); | | PRDWQRLINNNWGFRPKRLNFKLFNIQVKEVTDNNGVKTIANNLTSTVQ |
| modification at | | VFTDSDYQLPYVLGSAHEGCLPPFPADVFMIPQYGYLTLNDGSQAVGRS |
| position 604; | | SFYCLEYFPSQMLRTGNNFQFSYEFENVPFHSSYAHSQSLDRLMNPLID |
| 743 aa | | QYLYYLSKTINGSGONOQTLKFSVAGPSNMAVOGRNYIPGPSYRQQRVS |
| | | TTVTQNNNSEFAWPGASSWALNGRNSLMNPGPAMASHKEGEDRFFPLSG |
| | | SLIFGKQGTGRDNVDADKVMITNEEEIKTTNPVATESYGQVATNHQSPL |
| | | NGAVHLYAQAQTGWVPNQGILPGMVWQDRDVYLQGPIWAKIPHTDGNFH |
| | | PSPLMGGFGMKHPPPQILIKNTPVPADPPTAFNKDKLNSFITQYSTGQV |
| | | SVEIEWELQKENSKRWNPEIQYTSNYYKSNNVEFAVNTEGVYSEPRPIG |
| | | TRYLTRNL |
| TTD-014 | 8 | MAADGYLPDWLEDNLSEGIREWWALKPGAPQPKANQQHQDNARGLVLPG |
| 9 mer peptide | | YKYLGPGNGLDKGEPVNAADAAALEHDKAYDQQLKAGDNPYLKYNHADA |
| underlined, starts at | | EFQERLKEDTSFGGNLGRAVFQAKKRLLEPLGLVEEAAKTAPGKKRPVE |
| position 587 | | QSPQEPDSSAGIGKSGAQPAKKRLNFGQTGDTESVPDPQPIGEPPAAPS |
| (immediately | | GVGSLTMASGGGAPVADNNEGADGVGSSSGNWHCDSQWLGDRVITTSTR |
| subsequent to | | TWALPTYNNHLYKQISNSTSGGSSNDNAYFGYSTPWGYFDFNRFHCHFS |
| position 586); | | PRDWQRLINNNWGFRPKRLNFKLFNIQVKEVTDNNGVKTIANNLTSTVQ |
| modifications at | | VFTDSDYQLPYVLGSAHEGCLPPFPADVFMIPQYGYLTLNDGSQAVGRS |
| positions 600, 601, | | SFYCLEYFPSQMLRTGNNFQFSYEFENVPFHSSYAHSQSLDRLMNPLID |
| 602, and 604 | | QYLYYLSKTINGSGQNQQTLKFSVAGPSNMAVOGRNYIPGPSYRQQRVS |
| 743 aa | | TTVTQNNNSEFAWPGASSWALNGRNSLMNPGPAMASHKEGEDRFFPLSG |
| | | SLIFGKQGTGRDNVDADKVMITNEEEIKTTNPVATESYGQVATNHQSPL |
| | | NGAVHLYAQAQLSPVKNQGILPGMVWQDRDVYLQGPIWAKIPHTDGNFH |
| | | PSPLMGGFGMKHPPPQILIKNTPVPADPPTAFNKDKINSFITQYSTGQV |
| | | SVEIEWELQKENSKRWNPEIQYTSNYYKSNNVEFAVNTEGVYSEPRPIG |
| | | TRYLTRNL |

TABLE 39
Exemplary full length capsid nucleic acid sequences

| | SEQ | |
|---|---|---|
| Name and | ID | |
| Annotation | NO: | NT Sequence |
| TTD-001 | 3623 | atggctgccgatggttatcttccagattggctcgaggacaaccttagtgaaggaattcgc |
| 9 mer peptide | | gagtggtgggctttgaaacctggagcccctcaacccaaggcaaatcaacaacatcaagac |
| underlined | | aacgctcgaggtcttgtgcttccgggttacaaataccttggacccggcaacggactcgac |
| | | aagggggagccggtcaacgcagcagacgcggcggccctcgagcacgacaaggcctacgac |
| | | cagcagctcaaggccggagacaacccgtacctcaagtacaaccacgccgacgccgagttc |
| | | caggagcggctcaaagaagatacgtcttttgggggcaacctcgggcgagcagtcttccag |
| | | gccaaaaagaggcttcttgaacctcttggtctggttgaggaagcggctaagacggctcct |
| | | ggaaagaagaggcctgtagagcagtctcctcaggaaccggactcctccgcgggtattggc |
| | | aaatcgggtgcacagcccgctaaaaagagactcaatttcggtcagactggcgacacagag |
| | | tcagtcccagaccctcaaccaatcggagaacctcccgcagccccctcaggtgtgggatct |
| | | cttacaatggcttcaggtggtggcgcaccagtggcagacaataacgaaggtgccgatgga |
| | | gtgggtagttcctcgggaaattggcattgcgattcccaatggctgggggacagagtcatc |
| | | accaccagcacccgaacctgggccctgcccacctacaacaatcacctctacaagcaaatc |
| | | tccaacagcacatctggaggatcttcaaatgacaacgcctacttcggctacagcaccccc |
| | | tgggggtattttgacttcaacagattccactgccacttctcaccacgtgactggcagcga |
| | | ctcatcaacaacaactggggattccggcctaagcgactcaacttcaagctcttcaacatt |
| | | caggtcaaagaggttacggacaacaatggagtcaagaccatcgccaataaccttaccagc |
| | | acggtccaggtcttcacggactcagactatcagctcccgtacgtgctcgggtcggctcac |
| | | gagggctgcctcccgccgttcccagcggacgttttcatgattcctcagtacgggtatctg |
| | | acgcttaatgatggaagccaggccgtgggtcgttcgtccttttactgcctggaatatttc |
| | | ccgtcgcaaatgctaagaacgggtaacaacttccagttcagctacgagtttgagaacgta |
| | | cctttccatagcagctacgctcacagccaaagcctggaccgactaatgaatccactcatc |
| | | gaccaatacttgtactatctctcaaagactattaacggttctggacagaatcaacaaacg |
| | | ctaaaattcagtgtggccggacccagcaacatggctgtccagggaagaaactacatacct |
| | | ggacccagctaccgacaacaacgtgtctcaaccactgtgactcaaaacaacaacagcgaa |
| | | tttgcttggcctggagcttcttcttgggctctcaatggacgtaatagcttgatgaatcct |
| | | ggacctgctatggccagccacaaagaaggagaggaccgtttctttcctttgtctggatct |
| | | ttaatttttggcaaacaaggaactggaagagacaacgtggatgcggacaaagtcatgata |
| | | accaacgaagaagaaattaaaactactaacccggtagcaacggagtcctatggacaagtg |
| | | gccacaaaccaccagagtccgcttaatggtgccgtccatctttatgctcaggcgcagacc |
| | | ggctgggttcaaaaccaaggaatacttccgggtatggtttggcaggacagagatgtgtac |
| | | ctgcaaggacccatttgggccaaaattcctcacacggacggcaactttcacccttctccg |
| | | ctgatgggagggtttggaatgaagcacccgcctcctcagatcctcatcaaaaacacacct |
| | | gtacctgcCgatcctccaacggccttcaacaaggacaagctgaactctttcatcacccag |
| | | tattctactggccaagtcagcgtggagatcgagtgggagctgcagaaggaaaacagcaag |
| | | cgGtggaacccggagatccagtacacttccaactattacaagtctaataatgttgaattt |
| | | gctgttaatactgaaggtgtatatagtgaaccccgccccattggcaccagatacctgact |
| | | cgtaatctgtaa |
| TTD-002 | 3624 | atggctgccgatggttatcttccagattggctcgaggacaaccttagtgaaggaattcgc |
| 7 mer peptide | | gagtggtgggctttgaaacctggagcccctcaacccaaggcaaatcaacaacatcaagac |
| underlined | | aacgctcgaggtcttgtgcttccgggttacaaataccttggacccggcaacggactcgac |
| | | aagggggagccggtcaacgcagcagacgcggcggccctcgagcacgacaaggcctacgac |
| | | cagcagctcaaggccggagacaacccgtacctcaagtacaaccacgccgacgccgagttc |
| | | caggagcggctcaaagaagatacgtcttttgggggcaacctcgggcgagcagtcttccag |
| | | gccaaaaagaggcttcttgaacctcttggtctggttgaggaagcggctaagacggctcct |
| | | ggaaagaagaggcctgtagagcagtctcctcaggaaccggactcctccgcgggtattggc |
| | | aaatcgggtgcacagcccgctaaaaagagactcaatttcggtcagactggcgacacagag |
| | | tcagtcccagaccctcaaccaatcggagaacctcccgcagccccctcaggtgtgggatct |
| | | cttacaatggcttcaggtggtggcgcaccagtggcagacaataacgaaggtgccgatgga |
| | | gtgggtagttcctcgggaaattggcattgcgattcccaatggctgggggacagagtcatc |
| | | accaccagcacccgaacctgggccctgcccacctacaacaatcacctctacaagcaaatc |
| | | tccaacagcacatctggaggatcttcaaatgacaacgcctacttcggctacagcaccccc |
| | | tgggggtattttgacttcaacagattccactgccacttctcaccacgtgactggcagcga |
| | | ctcatcaacaacaactggggattccggcctaagcgactcaacttcaagctcttcaacatt |
| | | caggtcaaagaggttacggacaacaatggagtcaagaccatcgccaataaccttaccagc |
| | | acggtccaggtcttcacggactcagactatcagctcccgtacgtgctcgggtcggctcac |
| | | gagggctgcctcccgccgttcccagcggacgttttcatgattcctcagtacgggtatctg |
| | | acgcttaatgatggaagccaggccgtgggtcgttcgtccttttactgcctggaatatttc |
| | | ccgtcgcaaatgctaagaacgggtaacaacttccagttcagctacgagtttgagaacgta |
| | | cctttccatagcagctacgctcacagccaaagcctggaccgactaatgaatccactcatc |
| | | gaccaatacttgtactatctctcaaagactattaacggttctggacagaatcaacaaacg |
| | | ctaaaattcagtgtggccggacccagcaacatggctgtccagggaagaaactacatacct |
| | | ggacccagctaccgacaacaacgtgtctcaaccactgtgactcaaaacaacaacagcgaa |
| | | tttgcttggcctggagcttcttcttgggctctcaatggacgtaatagcttgatgaatcct |
| | | ggacctgctatggccagccacaaagaaggagaggaccgtttctttcctttgtctggatct |
| | | ttaatttttggcaaacaaggaactggaagagacaacgtggatgcggacaaagtcatgata |
| | | accaacgaagaagaaattaaaactactaacccggtagcaacggagtcctatggacaagtg |
| | | gccacaaaccaccagagtgcacaggctcgtgattctccgaagggttggcaggcgcagacc |
| | | ggctgggttcaaaaccaaggaatacttccgggtatggtttggcaggacagagatgtgtac |
| | | ctgcaaggacccatttgggccaaaattcctcacacggacggcaactttcacccttctccg |
| | | ctgatgggagggtttggaatgaagcacccgcctcctcagatcctcatcaaaaacacacct |
| | | gtacctgcCgatcctccaacggccttcaacaaggacaagctgaactctttcatcacccag |
| | | tattctactggccaagtcagcgtggagatcgagtgggagctgcagaaggaaaacagcaag |
| | | cgGtggaacccggagatccagtacacttccaactattacaagtctaataatgttgaattt |
| | | gctgttaatactgaaggtgtatatagtgaaccccgccccattggcaccagatacctgact |
| | | cgtaatctgtaa |
| | 3625 | atggctgccgatggttatcttccagattggctcgaggacaaccttagtgaaggaattcgc |
| | | gagtggtgggctttgaaacctggagcccctcaacccaaggcaaatcaacaacatcaagac |
| | | aacgctcgaggtcttgtgcttccgggttacaaataccttggacccggcaacggactcgac |
| | | aagggggagccggtcaacgcagcagacgcggcggccctcgagcacgacaaggcctacgac |
| | | cagcagctcaaggccggagacaacccgtacctcaagtacaaccacgccgacgccgagttc |
| | | caggagcggctcaaagaagatacgtcttttgggggcaacctcgggcgagcagtcttccag |
| | | gccaaaaagaggcttcttgaacctcttggtctggttgaggaagcggctaagacggctcct |
| | | ggaaagaagaggcctgtagagcagtctcctcaggaaccggactcctccgcgggtattggc |
| | | aaatcgggtgcacagcccgctaaaaagagactcaatttcggtcagactggcgacacagag |
| | | tcagtcccagaccctcaaccaatcggagaacctcccgcagccccctcaggtgtgggatct |
| | | cttacaatggcttcaggtggtggcgcaccagtggcagacaataacgaaggtgccgatgga |
| | | gtgggtagttcctcgggaaattggcattgcgattcccaatggctgggggacagagtcatc |
| | | accaccagcacccgaacctgggccctgcccacctacaacaatcacctctacaagcaaatc |
| | | tccaacagcacatctggaggatcttcaaatgacaacgcctacttcggctacagcaccccc |
| | | tgggggtattttgacttcaacagattccactgccacttctcaccacgtgactggcagcga |
| | | ctcatcaacaacaactggggattccggcctaagcgactcaacttcaagctcttcaacatt |
| | | caggtcaaagaggttacggacaacaatggagtcaagaccatcgccaataaccttaccagc |
| | | acggtccaggtcttcacggactcagactatcagctcccgtacgtgctcgggtcggctcac |
| | | gagggctgcctcccgccgttcccagcggacgttttcatgattcctcagtacgggtatctg |
| | | acgcttaatgatggaagccaggccgtgggtcgttcgtccttttactgcctggaatatttc |
| | | ccgtcgcaaatgctaagaacgggtaacaacttccagttcagctacgagtttgagaacgta |
| | | cctttccatagcagctacgctcacagccaaagcctggaccgactaatgaatccactcatc |
| | | gaccaatacttgtactatctctcaaagactattaacggttctggacagaatcaacaaacg |
| | | ctaaaattcagtgtggccggacccagcaacatggctgtccagggaagaaactacatacct |
| | | ggacccagctaccgacaacaacgtgtctcaaccactgtgactcaaaacaacaacagcgaa |
| | | tttgcttggcctggagcttcttcttgggctctcaatggacgtaatagcttgatgaatcct |
| | | ggacctgctatggccagccacaaagaaggagaggaccgtttctttcctttgtctggatct |
| | | ttaatttttggcaaacaaggaactggaagagacaacgtggatgcggacaaagtcatgata |
| | | accaacgaagaagaaattaaaactactaacccggtagcaacggagtcctatggacaagtg |
| | | gccacaaaccaccagagtgcacaggctcgtgattctccgaagggttggcaggcgcagacc |
| | | ggctgggttcaaaaccaaggaatacttccgggtatggtttggcaggacagagatgtgtac |
| | | ctgcaaggacccatttgggccaaaattcctcacacggacggcaactttcacccttctccg |
| | | ctgatgggagggtttggaatgaagcacccgcctcctcagatcctcatcaaaaacacacct |
| | | gtacctgcggatcctccaacggccttcaacaaggacaagctgaactctttcatcacccag |
| | | tattctactggccaagtcagcgtggagatcgagtgggagctgcagaaggaaaacagcaag |
| | | cgctggaacccggagatccagtacacttccaactattacaagtctaataatgttgaattt |
| | | gctgttaatactgaaggtgtatatagtgaaccccgccccattggcaccagatacctgact |
| | | cgtaatctgtaa |
| TTD-003 | 3626 | atggctgccgatggttatcttccagattggctcgaggacaaccttagtgaaggaattcgc |
| 7 mer peptide | | gagtggtgggctttgaaacctggagcccctcaacccaaggcaaatcaacaacatcaagac |
| underlined | | aacgctcgaggtcttgtgcttccgggttacaaataccttggacccggcaacggactcgac |
| | | aagggggagccggtcaacgcagcagacgcggcggccctcgagcacgacaaggcctacgac |
| | | cagcagctcaaggccggagacaacccgtacctcaagtacaaccacgccgacgccgagttc |
| | | caggagcggctcaaagaagatacgtcttttgggggcaacctcgggcgagcagtcttccag |
| | | gccaaaaagaggcttcttgaacctcttggtctggttgaggaagcggctaagacggctcct |
| | | ggaaagaagaggcctgtagagcagtctcctcaggaaccggactcctccgcgggtattggc |
| | | aaatcgggtgcacagcccgctaaaaagagactcaatttcggtcagactggcgacacagag |
| | | tcagtcccagaccctcaaccaatcggagaacctcccgcagccccctcaggtgtgggatct |
| | | cttacaatggcttcaggtggtggcgcaccagtggcagacaataacgaaggtgccgatgga |
| | | gtgggtagttcctcgggaaattggcattgcgattcccaatggctgggggacagagtcatc |
| | | accaccagcacccgaacctgggccctgcccacctacaacaatcacctctacaagcaaatc |
| | | tccaacagcacatctggaggatcttcaaatgacaacgcctacttcggctacagcaccccc |
| | | tgggggtattttgacttcaacagattccactgccacttctcaccacgtgactggcagcga |
| | | ctcatcaacaacaactggggattccggcctaagcgactcaacttcaagctcttcaacatt |
| | | caggtcaaagaggttacggacaacaatggagtcaagaccatcgccaataaccttaccagc |
| | | acggtccaggtcttcacggactcagactatcagctcccgtacgtgctcgggtcggctcac |
| | | gagggctgcctcccgccgttcccagcggacgttttcatgattcctcagtacgggtatctg |
| | | acgcttaatgatggaagccaggccgtgggtcgttcgtccttttactgcctggaatatttc |
| | | ccgtcgcaaatgctaagaacgggtaacaacttccagttcagctacgagtttgagaacgta |
| | | cctttccatagcagctacgctcacagccaaagcctggaccgactaatgaatccactcatc |
| | | gaccaatacttgtactatctctcaaagactattaacggttctggacagaatcaacaaacg |
| | | ctaaaattcagtgtggccggacccagcaacatggctgtccagggaagaaactacatacct |
| | | ggacccagctaccgacaacaacgtgtctcaaccactgtgactcaaaacaacaacagcgaa |
| | | tttgcttggcctggagcttcttcttgggctctcaatggacgtaatagcttgatgaatcct |
| | | ggacctgctatggccagccacaaagaaggagaggaccgtttctttcctttgtctggatct |
| | | ttaatttttggcaaacaaggaactggaagagacaacgtggatgcggacaaagtcatgata |
| | | accaacgaagaagaaattaaaactactaacccggtagcaacggagtcctatggacaagtg |
| | | gccacaaaccaccagagtgcacaggcttattctacggatgtgaggatgcaggcgcagacc |
| | | ggctgggttcaaaaccaaggaatacttccgggtatggtttggcaggacagagatgtgtac |
| | | ctgcaaggacccatttgggccaaaattcctcacacggacggcaactttcacccttctccg |
| | | ctgatgggagggtttggaatgaagcacccgcctcctcagatcctcatcaaaaacacacct |
| | | gtacctgcCgatcctccaacggccttcaacaaggacaagctgaactctttcatcacccag |
| | | tattctactggccaagtcagcgtggagatcgagtgggagctgcagaaggaaaacagcaag |
| | | cgGtggaacccggagatccagtacacttccaactattacaagtctaataatgttgaattt |
| | | gctgttaatactgaaggtgtatatagtgaaccccgccccattggcaccagatacctgact |
| | | cgtaatctgtaa |
| TTD-004 | 3627 | atggctgccgatggttatcttccagattggctcgaggacaaccttagtgaaggaattcgc |
| 7 mer peptide | | gagtggtgggctttgaaacctggagcccctcaacccaaggcaaatcaacaacatcaagac |
| underlined | | aacgctcgaggtcttgtgcttccgggttacaaataccttggacccggcaacggactcgac |
| | | aagggggagccggtcaacgcagcagacgcggcggccctcgagcacgacaaggcctacgac |
| | | cagcagctcaaggccggagacaacccgtacctcaagtacaaccacgccgacgccgagttc |
| | | caggagcggctcaaagaagatacgtcttttgggggcaacctcgggcgagcagtcttccag |
| | | gccaaaaagaggcttcttgaacctcttggtctggttgaggaagcggctaagacggctcct |
| | | ggaaagaagaggcctgtagagcagtctcctcaggaaccggactcctccgcgggtattggc |
| | | aaatcgggtgcacagcccgctaaaaagagactcaatttcggtcagactggcgacacagag |
| | | tcagtcccagaccctcaaccaatcggagaacctcccgcagccccctcaggtgtgggatct |
| | | cttacaatggcttcaggtggtggcgcaccagtggcagacaataacgaaggtgccgatgga |
| | | gtgggtagttcctcgggaaattggcattgcgattcccaatggctgggggacagagtcatc |
| | | accaccagcacccgaacctgggccctgcccacctacaacaatcacctctacaagcaaatc |
| | | tccaacagcacatctggaggatcttcaaatgacaacgcctacttcggctacagcaccccc |
| | | tgggggtattttgacttcaacagattccactgccacttctcaccacgtgactggcagcga |
| | | ctcatcaacaacaactggggattccggcctaagcgactcaacttcaagctcttcaacatt |
| | | caggtcaaagaggttacggacaacaatggagtcaagaccatcgccaataaccttaccagc |
| | | acggtccaggtcttcacggactcagactatcagctcccgtacgtgctcgggtcggctcac |
| | | gagggctgcctcccgccgttcccagcggacgttttcatgattcctcagtacgggtatctg |
| | | acgcttaatgatggaagccaggccgtgggtcgttcgtccttttactgcctggaatatttc |
| | | ccgtcgcaaatgctaagaacgggtaacaacttccagttcagctacgagtttgagaacgta |
| | | cctttccatagcagctacgctcacagccaaagcctggaccgactaatgaatccactcatc |
| | | gaccaatacttgtactatctctcaaagactattaacggttctggacagaatcaacaaacg |
| | | ctaaaattcagtgtggccggacccagcaacatggctgtccagggaagaaactacatacct |
| | | ggacccagctaccgacaacaacgtgtctcaaccactgtgactcaaaacaacaacagcgaa |
| | | tttgcttggcctggagcttcttcttgggctctcaatggacgtaatagcttgatgaatcct |
| | | ggacctgctatggccagccacaaagaaggagaggaccgtttctttcctttgtctggatct |
| | | ttaatttttggcaaacaaggaactggaagagacaacgtggatgcggacaaagtcatgata |
| | | accaacgaagaagaaattaaaactactaacccggtagcaacggagtcctatggacaagtg |
| | | gccacaaaccaccagagtgcacagattgttatgaattcgttgaaggctcaggcgcagacc |
| | | ggctgggttcaaaaccaaggaatacttccgggtatggtttggcaggacagagatgtgtac |
| | | ctgcaaggacccatttgggccaaaattcctcacacggacggcaactttcacccttctccg |
| | | ctgatgggagggtttggaatgaagcacccgcctcctcagatcctcatcaaaaacacacct |
| | | gtacctgcCgatcctccaacggccttcaacaaggacaagctgaactctttcatcacccag |
| | | tattctactggccaagtcagcgtggagatcgagtgggagctgcagaaggaaaacagcaag |
| | | cgGtggaacccggagatccagtacacttccaactattacaagtctaataatgttgaattt |
| | | gctgttaatactgaaggtgtatatagtgaaccccgccccattggcaccagatacctgact |
| | | cgtaatctgtaa |
| TTD-005 | 3628 | atggctgccgatggttatcttccagattggctcgaggacaaccttagtgaaggaattcgc |
| 7 mer peptide | | gagtggtgggctttgaaacctggagcccctcaacccaaggcaaatcaacaacatcaagac |
| underlined | | aacgctcgaggtcttgtgcttccgggttacaaataccttggacccggcaacggactcgac |
| | | aagggggagccggtcaacgcagcagacgcggcggccctcgagcacgacaaggcctacgac |
| | | cagcagctcaaggccggagacaacccgtacctcaagtacaaccacgccgacgccgagttc |
| | | caggagcggctcaaagaagatacgtcttttgggggcaacctcgggcgagcagtcttccag |
| | | gccaaaaagaggcttcttgaacctcttggtctggttgaggaagcggctaagacggctcct |
| | | ggaaagaagaggcctgtagagcagtctcctcaggaaccggactcctccgcgggtattggc |
| | | aaatcgggtgcacagcccgctaaaaagagactcaatttcggtcagactggcgacacagag |
| | | tcagtcccagaccctcaaccaatcggagaacctcccgcagccccctcaggtgtgggatct |
| | | cttacaatggcttcaggtggtggcgcaccagtggcagacaataacgaaggtgccgatgga |
| | | gtgggtagttcctcgggaaattggcattgcgattcccaatggctgggggacagagtcatc |
| | | accaccagcacccgaacctgggccctgcccacctacaacaatcacctctacaagcaaatc |
| | | tccaacagcacatctggaggatcttcaaatgacaacgcctacttcggctacagcaccccc |
| | | tgggggtattttgacttcaacagattccactgccacttctcaccacgtgactggcagcga |
| | | ctcatcaacaacaactggggattccggcctaagcgactcaacttcaagctcttcaacatt |
| | | caggtcaaagaggttacggacaacaatggagtcaagaccatcgccaataaccttaccagc |
| | | acggtccaggtcttcacggactcagactatcagctcccgtacgtgctcgggtcggctcac |
| | | gagggctgcctcccgccgttcccagcggacgttttcatgattcctcagtacgggtatctg |
| | | acgcttaatgatggaagccaggccgtgggtcgttcgtccttttactgcctggaatatttc |
| | | ccgtcgcaaatgctaagaacgggtaacaacttccagttcagctacgagtttgagaacgta |
| | | cctttccatagcagctacgctcacagccaaagcctggaccgactaatgaatccactcatc |
| | | gaccaatacttgtactatctctcaaagactattaacggttctggacagaatcaacaaacg |
| | | ctaaaattcagtgtggccggacccagcaacatggctgtccagggaagaaactacatacct |
| | | ggacccagctaccgacaacaacgtgtctcaaccactgtgactcaaaacaacaacagcgaa |
| | | tttgcttggcctggagcttcttcttgggctctcaatggacgtaatagcttgatgaatcct |
| | | ggacctgctatggccagccacaaagaaggagaggaccgtttctttcctttgtctggatct |
| | | ttaatttttggcaaacaaggaactggaagagacaacgtggatgcggacaaagtcatgata |
| | | accaacgaagaagaaattaaaactactaacccggtagcaacggagtcctatggacaagtg |
| | | gccacaaaccaccagagtgcacaggctcgggagagtcctcgtgggctgcaggcgcagacc |
| | | ggctgggttcaaaaccaaggaatacttccgggtatggtttggcaggacagagatgtgtac |
| | | ctgcaaggacccatttgggccaaaattcctcacacggacggcaactttcacccttctccg |
| | | ctgatgggagggtttggaatgaagcacccgcctcctcagatcctcatcaaaaacacacct |
| | | gtacctgcCgatcctccaacggccttcaacaaggacaagctgaactctttcatcacccag |
| | | tattctactggccaagtcagcgtggagatcgagtgggagctgcagaaggaaaacagcaag |
| | | cgGtggaacccggagatccagtacacttccaactattacaagtctaataatgttgaattt |
| | | gctgttaatactgaaggtgtatatagtgaaccccgccccattggcaccagatacctgact |
| | | cgtaatctgtaa |
| TTD-006 | 3629 | atggctgccgatggttatcttccagattggctcgaggacaaccttagtgaaggaattcgc |
| 7 mer peptide | | gagtggtgggctttgaaacctggagcccctcaacccaaggcaaatcaacaacatcaagac |
| underlined | | aacgctcgaggtcttgtgcttccgggttacaaataccttggacccggcaacggactcgac |
| | | aagggggagccggtcaacgcagcagacgcggcggccctcgagcacgacaaggcctacgac |
| | | cagcagctcaaggccggagacaacccgtacctcaagtacaaccacgccgacgccgagttc |
| | | caggagcggctcaaagaagatacgtcttttgggggcaacctcgggcgagcagtcttccag |
| | | gccaaaaagaggcttcttgaacctcttggtctggttgaggaagcggctaagacggctcct |
| | | ggaaagaagaggcctgtagagcagtctcctcaggaaccggactcctccgcgggtattggc |
| | | aaatcgggtgcacagcccgctaaaaagagactcaatttcggtcagactggcgacacagag |
| | | tcagtcccagaccctcaaccaatcggagaacctcccgcagccccctcaggtgtgggatct |
| | | cttacaatggcttcaggtggtggcgcaccagtggcagacaataacgaaggtgccgatgga |
| | | gtgggtagttcctcgggaaattggcattgcgattcccaatggctgggggacagagtcatc |
| | | accaccagcacccgaacctgggccctgcccacctacaacaatcacctctacaagcaaatc |
| | | tccaacagcacatctggaggatcttcaaatgacaacgcctacttcggctacagcaccccc |
| | | tgggggtattttgacttcaacagattccactgccacttctcaccacgtgactggcagcga |
| | | ctcatcaacaacaactggggattccggcctaagcgactcaacttcaagctcttcaacatt |
| | | caggtcaaagaggttacggacaacaatggagtcaagaccatcgccaataaccttaccagc |
| | | acggtccaggtcttcacggactcagactatcagctcccgtacgtgctcgggtcggctcac |
| | | gagggctgcctcccgccgttcccagcggacgttttcatgattcctcagtacgggtatctg |
| | | acgcttaatgatggaagccaggccgtgggtcgttcgtccttttactgcctggaatatttc |
| | | ccgtcgcaaatgctaagaacgggtaacaacttccagttcagctacgagtttgagaacgta |
| | | cctttccatagcagctacgctcacagccaaagcctggaccgactaatgaatccactcatc |
| | | gaccaatacttgtactatctctcaaagactattaacggttctggacagaatcaacaaacg |
| | | ctaaaattcagtgtggccggacccagcaacatggctgtccagggaagaaactacatacct |
| | | ggacccagctaccgacaacaacgtgtctcaaccactgtgactcaaaacaacaacagcgaa |
| | | tttgcttggcctggagcttcttcttgggctctcaatggacgtaatagcttgatgaatcct |
| | | ggacctgctatggccagccacaaagaaggagaggaccgtttctttcctttgtctggatct |
| | | ttaatttttggcaaacaaggaactggaagagacaacgtggatgcggacaaagtcatgata |
| | | accaacgaagaagaaattaaaactactaacccggtagcaacggagtcctatggacaagtg |
| | | gccacaaaccaccagagtgcacaggctagttttaatgatactagggctcaggcgcagacc |
| | | ggctgggttcaaaaccaaggaatacttccgggtatggtttggcaggacagagatgtgtac |
| | | ctgcaaggacccatttgggccaaaattcctcacacggacggcaactttcacccttctccg |
| | | ctgatgggagggtttggaatgaagcacccgcctcctcagatcctcatcaaaaacacacct |
| | | gtacctgcCgatcctccaacggccttcaacaaggacaagctgaactctttcatcacccag |
| | | tattctactggccaagtcagcgtggagatcgagtgggagctgcagaaggaaaacagcaag |
| | | cgGtggaacccggagatccagtacacttccaactattacaagtctaataatgttgaattt |
| | | gctgttaatactgaaggtgtatatagtgaaccccgccccattggcaccagatacctgact |
| | | cgtaatctgtaa |
| TTD-007 | 3630 | atggctgccgatggttatcttccagattggctcgaggacaaccttagtgaaggaattcgc |
| 9 mer peptide | | gagtggtgggctttgaaacctggagcccctcaacccaaggcaaatcaacaacatcaagac |
| underlined | | aacgctcgaggtcttgtgcttccgggttacaaataccttggacccggcaacggactcgac |
| | | aagggggagccggtcaacgcagcagacgcggcggccctcgagcacgacaaggcctacgac |
| | | cagcagctcaaggccggagacaacccgtacctcaagtacaaccacgccgacgccgagttc |
| | | caggagcggctcaaagaagatacgtcttttgggggcaacctcgggcgagcagtcttccag |
| | | gccaaaaagaggcttcttgaacctcttggtctggttgaggaagcggctaagacggctcct |
| | | ggaaagaagaggcctgtagagcagtctcctcaggaaccggactcctccgcgggtattggc |
| | | aaatcgggtgcacagcccgctaaaaagagactcaatttcggtcagactggcgacacagag |
| | | tcagtcccagaccctcaaccaatcggagaacctcccgcagccccctcaggtgtgggatct |
| | | cttacaatggcttcaggtggtggcgcaccagtggcagacaataacgaaggtgccgatgga |
| | | gtgggtagttcctcgggaaattggcattgcgattcccaatggctgggggacagagtcatc |
| | | accaccagcacccgaacctgggccctgcccacctacaacaatcacctctacaagcaaatc |
| | | tccaacagcacatctggaggatcttcaaatgacaacgcctacttcggctacagcaccccc |
| | | tgggggtattttgacttcaacagattccactgccacttctcaccacgtgactggcagcga |
| | | ctcatcaacaacaactggggattccggcctaagcgactcaacttcaagctcttcaacatt |
| | | caggtcaaagaggttacggacaacaatggagtcaagaccatcgccaataaccttaccagc |
| | | acggtccaggtcttcacggactcagactatcagctcccgtacgtgctcgggtcggctcac |
| | | gagggctgcctcccgccgttcccagcggacgttttcatgattcctcagtacgggtatctg |
| | | acgcttaatgatggaagccaggccgtgggtcgttcgtccttttactgcctggaatatttc |
| | | ccgtcgcaaatgctaagaacgggtaacaacttccagttcagctacgagtttgagaacgta |
| | | cctttccatagcagctacgctcacagccaaagcctggaccgactaatgaatccactcatc |
| | | gaccaatacttgtactatctctcaaagactattaacggttctggacagaatcaacaaacg |
| | | ctaaaattcagtgtggccggacccagcaacatggctgtccagggaagaaactacatacct |
| | | ggacccagctaccgacaacaacgtgtctcaaccactgtgactcaaaacaacaacagcgaa |
| | | tttgcttggcctggagcttcttcttgggctctcaatggacgtaatagcttgatgaatcct |
| | | ggacctgctatggccagccacaaagaaggagaggaccgtttctttcctttgtctggatct |
| | | ttaatttttggcaaacaaggaactggaagagacaacgtggatgcggacaaagtcatgata |
| | | accaacgaagaagaaattaaaactactaacccggtagcaacggagtcctatggacaagtg |
| | | gccacaaaccaccagagtggtggtacgttggccgtcgtgtcgcttgctcaggcgcagacc |
| | | ggctgggttcaaaaccaaggaatacttccgggtatggtttggcaggacagagatgtgtac |
| | | ctgcaaggacccatttgggccaaaattcctcacacggacggcaactttcacccttctccg |
| | | ctgatgggagggtttggaatgaagcacccgcctcctcagatcctcatcaaaaacacacct |
| | | gtacctgcCgatcctccaacggccttcaacaaggacaagctgaactctttcatcacccag |
| | | tattctactggccaagtcagcgtggagatcgagtgggagctgcagaaggaaaacagcaag |
| | | cgGtggaacccggagatccagtacacttccaactattacaagtctaataatgttgaattt |
| | | gctgttaatactgaaggtgtatatagtgaaccccgccccattggcaccagatacctgact |
| | | cgtaatctgtaa |
| TTD-008 | 3631 | atggctgccgatggttatcttccagattggctcgaggacaaccttagtgaaggaattcgc |
| 7 mer peptide | | gagtggtgggctttgaaacctggagcccctcaacccaaggcaaatcaacaacatcaagac |
| underlined | | aacgctcgaggtcttgtgcttccgggttacaaataccttggacccggcaacggactcgac |
| | | aagggggagccggtcaacgcagcagacgcggcggccctcgagcacgacaaggcctacgac |
| | | cagcagctcaaggccggagacaacccgtacctcaagtacaaccacgccgacgccgagttc |
| | | caggagcggctcaaagaagatacgtcttttgggggcaacctcgggcgagcagtcttccag |
| | | gccaaaaagaggcttcttgaacctcttggtctggttgaggaagcggctaagacggctcct |
| | | ggaaagaagaggcctgtagagcagtctcctcaggaaccggactcctccgcgggtattggc |
| | | aaatcgggtgcacagcccgctaaaaagagactcaatttcggtcagactggcgacacagag |
| | | tcagtcccagaccctcaaccaatcggagaacctcccgcagccccctcaggtgtgggatct |
| | | cttacaatggcttcaggtggtggcgcaccagtggcagacaataacgaaggtgccgatgga |
| | | gtgggtagttcctcgggaaattggcattgcgattcccaatggctgggggacagagtcatc |
| | | accaccagcacccgaacctgggccctgcccacctacaacaatcacctctacaagcaaatc |
| | | tccaacagcacatctggaggatcttcaaatgacaacgcctacttcggctacagcaccccc |
| | | tgggggtattttgacttcaacagattccactgccacttctcaccacgtgactggcagcga |
| | | ctcatcaacaacaactggggattccggcctaagcgactcaacttcaagctcttcaacatt |
| | | caggtcaaagaggttacggacaacaatggagtcaagaccatcgccaataaccttaccagc |
| | | acggtccaggtcttcacggactcagactatcagctcccgtacgtgctcgggtcggctcac |
| | | gagggctgcctcccgccgttcccagcggacgttttcatgattcctcagtacgggtatctg |
| | | acgcttaatgatggaagccaggccgtgggtcgttcgtccttttactgcctggaatatttc |
| | | ccgtcgcaaatgctaagaacgggtaacaacttccagttcagctacgagtttgagaacgta |
| | | cctttccatagcagctacgctcacagccaaagcctggaccgactaatgaatccactcatc |
| | | gaccaatacttgtactatctctcaaagactattaacggttctggacagaatcaacaaacg |
| | | ctaaaattcagtgtggccggacccagcaacatggctgtccagggaagaaactacatacct |
| | | ggacccagctaccgacaacaacgtgtctcaaccactgtgactcaaaacaacaacagcgaa |
| | | tttgcttggcctggagcttcttcttgggctctcaatggacgtaatagcttgatgaatcct |
| | | ggacctgctatggccagccacaaagaaggagaggaccgtttctttcctttgtctggatct |
| | | ttaatttttggcaaacaaggaactggaagagacaacgtggatgcggacaaagtcatgata |
| | | accaacgaagaagaaattaaaactactaacccggtagcaacggagtcctatggacaagtg |
| | | gccacaaaccaccagagtgcacaggcttatgggttgccgaagggtcctcaggcgcagacc |
| | | ggctgggttcaaaaccaaggaatacttccgggtatggtttggcaggacagagatgtgtac |
| | | ctgcaaggacccatttgggccaaaattcctcacacggacggcaactttcacccttctccg |
| | | ctgatgggagggtttggaatgaagcacccgcctcctcagatcctcatcaaaaacacacct |
| | | gtacctgcCgatcctccaacggccttcaacaaggacaagctgaactctttcatcacccag |
| | | tattctactggccaagtcagcgtggagatcgagtgggagctgcagaaggaaaacagcaag |
| | | cgGtggaacccggagatccagtacacttccaactattacaagtctaataatgttgaattt |
| | | gctgttaatactgaaggtgtatatagtgaaccccgccccattggcaccagatacctgact |
| | | cgtaatctgtaa |
| TTD-009 | 3632 | atggctgccgatggttatcttccagattggctcgaggacaaccttagtgaaggaattcgc |
| 7 mer peptide | | gagtggtgggctttgaaacctggagcccctcaacccaaggcaaatcaacaacatcaagac |
| underlined | | aacgctcgaggtcttgtgcttccgggttacaaataccttggacccggcaacggactcgac |
| | | aagggggagccggtcaacgcagcagacgcggcggccctcgagcacgacaaggcctacgac |
| | | cagcagctcaaggccggagacaacccgtacctcaagtacaaccacgccgacgccgagttc |
| | | caggagcggctcaaagaagatacgtcttttgggggcaacctcgggcgagcagtcttccag |
| | | gccaaaaagaggcttcttgaacctcttggtctggttgaggaagcggctaagacggctcct |
| | | ggaaagaagaggcctgtagagcagtctcctcaggaaccggactcctccgcgggtattggc |
| | | aaatcgggtgcacagcccgctaaaaagagactcaatttcggtcagactggcgacacagag |
| | | tcagtcccagaccctcaaccaatcggagaacctcccgcagccccctcaggtgtgggatct |
| | | cttacaatggcttcaggtggtggcgcaccagtggcagacaataacgaaggtgccgatgga |
| | | gtgggtagttcctcgggaaattggcattgcgattcccaatggctgggggacagagtcatc |
| | | accaccagcacccgaacctgggccctgcccacctacaacaatcacctctacaagcaaatc |
| | | tccaacagcacatctggaggatcttcaaatgacaacgcctacttcggctacagcaccccc |
| | | tgggggtattttgacttcaacagattccactgccacttctcaccacgtgactggcagcga |
| | | ctcatcaacaacaactggggattccggcctaagcgactcaacttcaagctcttcaacatt |
| | | caggtcaaagaggttacggacaacaatggagtcaagaccatcgccaataaccttaccagc |
| | | acggtccaggtcttcacggactcagactatcagctcccgtacgtgctcgggtcggctcac |
| | | gagggctgcctcccgccgttcccagcggacgttttcatgattcctcagtacgggtatctg |
| | | acgcttaatgatggaagccaggccgtgggtcgttcgtccttttactgcctggaatatttc |
| | | ccgtcgcaaatgctaagaacgggtaacaacttccagttcagctacgagtttgagaacgta |
| | | cctttccatagcagctacgctcacagccaaagcctggaccgactaatgaatccactcatc |
| | | gaccaatacttgtactatctctcaaagactattaacggttctggacagaatcaacaaacg |
| | | ctaaaattcagtgtggccggacccagcaacatggctgtccagggaagaaactacatacct |
| | | ggacccagctaccgacaacaacgtgtctcaaccactgtgactcaaaacaacaacagcgaa |
| | | tttgcttggcctggagcttcttcttgggctctcaatggacgtaatagcttgatgaatcct |
| | | ggacctgctatggccagccacaaagaaggagaggaccgtttctttcctttgtctggatct |
| | | ttaatttttggcaaacaaggaactggaagagacaacgtggatgcggacaaagtcatgata |
| | | accaacgaagaagaaattaaaactactaacccggtagcaacggagtcctatggacaagtg |
| | | gccacaaaccaccagagtgcacaggcttcgactgggacgcttcggcttcaggcgcagacc |
| | | ggctgggttcaaaaccaaggaatacttccgggtatggtttggcaggacagagatgtgtac |
| | | ctgcaaggacccatttgggccaaaattcctcacacggacggcaactttcacccttctccg |
| | | ctgatgggagggtttggaatgaagcacccgcctcctcagatcctcatcaaaaacacacct |
| | | gtacctgcCgatcctccaacggccttcaacaaggacaagctgaactctttcatcacccag |
| | | tattctactggccaagtcagcgtggagatcgagtgggagctgcagaaggaaaacagcaag |
| | | cgGtggaacccggagatccagtacacttccaactattacaagtctaataatgttgaattt |
| | | gctgttaatactgaaggtgtatatagtgaaccccgccccattggcaccagatacctgact |
| | | cgtaatctgtaa |
| TTD-010 | 3633 | atggctgccgatggttatcttccagattggctcgaggacaaccttagtgaaggaattcgc |
| 7 mer peptide | | gagtggtgggctttgaaacctggagcccctcaacccaaggcaaatcaacaacatcaagac |
| underlined | | aacgctcgaggtcttgtgcttccgggttacaaataccttggacccggcaacggactcgac |
| | | aagggggagccggtcaacgcagcagacgcggcggccctcgagcacgacaaggcctacgac |
| | | cagcagctcaaggccggagacaacccgtacctcaagtacaaccacgccgacgccgagttc |
| | | caggagcggctcaaagaagatacgtcttttgggggcaacctcgggcgagcagtcttccag |
| | | gccaaaaagaggcttcttgaacctcttggtctggttgaggaagcggctaagacggctcct |
| | | ggaaagaagaggcctgtagagcagtctcctcaggaaccggactcctccgcgggtattggc |
| | | aaatcgggtgcacagcccgctaaaaagagactcaatttcggtcagactggcgacacagag |
| | | tcagtcccagaccctcaaccaatcggagaacctcccgcagccccctcaggtgtgggatct |
| | | cttacaatggcttcaggtggtggcgcaccagtggcagacaataacgaaggtgccgatgga |
| | | gtgggtagttcctcgggaaattggcattgcgattcccaatggctgggggacagagtcatc |
| | | accaccagcacccgaacctgggccctgcccacctacaacaatcacctctacaagcaaatc |
| | | tccaacagcacatctggaggatcttcaaatgacaacgcctacttcggctacagcaccccc |
| | | tgggggtattttgacttcaacagattccactgccacttctcaccacgtgactggcagcga |
| | | ctcatcaacaacaactggggattccggcctaagcgactcaacttcaagctcttcaacatt |
| | | caggtcaaagaggttacggacaacaatggagtcaagaccatcgccaataaccttaccagc |
| | | acggtccaggtcttcacggactcagactatcagctcccgtacgtgctcgggtcggctcac |
| | | gagggctgcctcccgccgttcccagcggacgttttcatgattcctcagtacgggtatctg |
| | | acgcttaatgatggaagccaggccgtgggtcgttcgtccttttactgcctggaatatttc |
| | | ccgtcgcaaatgctaagaacgggtaacaacttccagttcagctacgagtttgagaacgta |
| | | cctttccatagcagctacgctcacagccaaagcctggaccgactaatgaatccactcatc |
| | | gaccaatacttgtactatctctcaaagactattaacggttctggacagaatcaacaaacg |
| | | ctaaaattcagtgtggccggacccagcaacatggctgtccagggaagaaactacatacct |
| | | ggacccagctaccgacaacaacgtgtctcaaccactgtgactcaaaacaacaacagcgaa |
| | | tttgcttggcctggagcttcttcttgggctctcaatggacgtaatagcttgatgaatcct |
| | | ggacctgctatggccagccacaaagaaggagaggaccgtttctttcctttgtctggatct |
| | | ttaatttttggcaaacaaggaactggaagagacaacgtggatgcggacaaagtcatgata |
| | | accaacgaagaagaaattaaaactactaacccggtagcaacggagtcctatggacaagtg |
| | | gccacaaaccaccagagtgcgcaggcgtattcgacggatgagaggatgcaggcgcagacc |
| | | ggctgggttcaaaaccaaggaatacttccgggtatggtttggcaggacagagatgtgtac |
| | | ctgcaaggacccatttgggccaaaattcctcacacggacggcaactttcacccttctccg |
| | | ctgatgggagggtttggaatgaagcacccgcctcctcagatcctcatcaaaaacacacct |
| | | gtacctgcCgatcctccaacggccttcaacaaggacaagctgaactctttcatcacccag |
| | | tattctactggccaagtcagcgtggagatcgagtgggagctgcagaaggaaaacagcaag |
| | | cgGtggaacccggagatccagtacacttccaactattacaagtctaataatgttgaattt |
| | | gctgttaatactgaaggtgtatatagtgaaccccgccccattggcaccagatacctgact |
| | | cgtaatctgtaa |
| TTD-011 | 3634 | atggctgccgatggttatcttccagattggctcgaggacaaccttagtgaaggaattcgc |
| 7 mer peptide | | gagtggtgggctttgaaacctggagcccctcaacccaaggcaaatcaacaacatcaagac |
| underlined | | aacgctcgaggtcttgtgcttccgggttacaaataccttggacccggcaacggactcgac |
| | | aagggggagccggtcaacgcagcagacgcggcggccctcgagcacgacaaggcctacgac |
| | | cagcagctcaaggccggagacaacccgtacctcaagtacaaccacgccgacgccgagttc |
| | | caggagcggctcaaagaagatacgtcttttgggggcaacctcgggcgagcagtcttccag |
| | | gccaaaaagaggcttcttgaacctcttggtctggttgaggaagcggctaagacggctcct |
| | | ggaaagaagaggcctgtagagcagtctcctcaggaaccggactcctccgcgggtattggc |
| | | aaatcgggtgcacagcccgctaaaaagagactcaatttcggtcagactggcgacacagag |
| | | tcagtcccagaccctcaaccaatcggagaacctcccgcagccccctcaggtgtgggatct |
| | | cttacaatggcttcaggtggtggcgcaccagtggcagacaataacgaaggtgccgatgga |
| | | gtgggtagttcctcgggaaattggcattgcgattcccaatggctgggggacagagtcatc |
| | | accaccagcacccgaacctgggccctgcccacctacaacaatcacctctacaagcaaatc |
| | | tccaacagcacatctggaggatcttcaaatgacaacgcctacttcggctacagcaccccc |
| | | tgggggtattttgacttcaacagattccactgccacttctcaccacgtgactggcagcga |
| | | ctcatcaacaacaactggggattccggcctaagcgactcaacttcaagctcttcaacatt |
| | | caggtcaaagaggttacggacaacaatggagtcaagaccatcgccaataaccttaccagc |
| | | acggtccaggtcttcacggactcagactatcagctcccgtacgtgctcgggtcggctcac |
| | | gagggctgcctcccgccgttcccagcggacgttttcatgattcctcagtacgggtatctg |
| | | acgcttaatgatggaagccaggccgtgggtcgttcgtccttttactgcctggaatatttc |
| | | ccgtcgcaaatgctaagaacgggtaacaacttccagttcagctacgagtttgagaacgta |
| | | cctttccatagcagctacgctcacagccaaagcctggaccgactaatgaatccactcatc |
| | | gaccaatacttgtactatctctcaaagactattaacggttctggacagaatcaacaaacg |
| | | ctaaaattcagtgtggccggacccagcaacatggctgtccagggaagaaactacatacct |
| | | ggacccagctaccgacaacaacgtgtctcaaccactgtgactcaaaacaacaacagcgaa |
| | | tttgcttggcctggagcttcttcttgggctctcaatggacgtaatagcttgatgaatcct |
| | | ggacctgctatggccagccacaaagaaggagaggaccgtttctttcctttgtctggatct |
| | | ttaatttttggcaaacaaggaactggaagagacaacgtggatgcggacaaagtcatgata |
| | | accaacgaagaagaaattaaaactactaacccggtagcaacggagtcctatggacaagtg |
| | | gccacaaaccaccagagtgcgcaggcgtattcgacggatgagaggaagcaggcgcagacc |
| | | ggctgggttcaaaaccaaggaatacttccgggtatggtttggcaggacagagatgtgtac |
| | | ctgcaaggacccatttgggccaaaattcctcacacggacggcaactttcacccttctccg |
| | | ctgatgggagggtttggaatgaagcacccgcctcctcagatcctcatcaaaaacacacct |
| | | gtacctgcCgatcctccaacggccttcaacaaggacaagctgaactctttcatcacccag |
| | | tattctactggccaagtcagcgtggagatcgagtgggagctgcagaaggaaaacagcaag |
| | | cgGtggaacccggagatccagtacacttccaactattacaagtctaataatgttgaattt |
| | | gctgttaatactgaaggtgtatatagtgaaccccgccccattggcaccagatacctgact |
| | | cgtaatctgtaa |
| TTD-012 | 3635 | atggctgccgatggttatcttccagattggctcgaggacaaccttagtgaaggaattcgc |
| 7 mer peptide | | gagtggtgggctttgaaacctggagcccctcaacccaaggcaaatcaacaacatcaagac |
| underlined | | aacgctcgaggtcttgtgcttccgggttacaaataccttggacccggcaacggactcgac |
| | | aagggggagccggtcaacgcagcagacgcggcggccctcgagcacgacaaggcctacgac |
| | | cagcagctcaaggccggagacaacccgtacctcaagtacaaccacgccgacgccgagttc |
| | | caggagcggctcaaagaagatacgtcttttgggggcaacctcgggcgagcagtcttccag |
| | | gccaaaaagaggcttcttgaacctcttggtctggttgaggaagcggctaagacggctcct |
| | | ggaaagaagaggcctgtagagcagtctcctcaggaaccggactcctccgcgggtattggc |
| | | aaatcgggtgcacagcccgctaaaaagagactcaatttcggtcagactggcgacacagag |
| | | tcagtcccagaccctcaaccaatcggagaacctcccgcagccccctcaggtgtgggatct |
| | | cttacaatggcttcaggtggtggcgcaccagtggcagacaataacgaaggtgccgatgga |
| | | gtgggtagttcctcgggaaattggcattgcgattcccaatggctgggggacagagtcatc |
| | | accaccagcacccgaacctgggccctgcccacctacaacaatcacctctacaagcaaatc |
| | | tccaacagcacatctggaggatcttcaaatgacaacgcctacttcggctacagcaccccc |
| | | tgggggtattttgacttcaacagattccactgccacttctcaccacgtgactggcagcga |
| | | ctcatcaacaacaactggggattccggcctaagcgactcaacttcaagctcttcaacatt |
| | | caggtcaaagaggttacggacaacaatggagtcaagaccatcgccaataaccttaccagc |
| | | acggtccaggtcttcacggactcagactatcagctcccgtacgtgctcgggtcggctcac |
| | | gagggctgcctcccgccgttcccagcggacgttttcatgattcctcagtacgggtatctg |
| | | acgcttaatgatggaagccaggccgtgggtcgttcgtccttttactgcctggaatatttc |
| | | ccgtcgcaaatgctaagaacgggtaacaacttccagttcagctacgagtttgagaacgta |
| | | cctttccatagcagctacgctcacagccaaagcctggaccgactaatgaatccactcatc |
| | | gaccaatacttgtactatctctcaaagactattaacggttctggacagaatcaacaaacg |
| | | ctaaaattcagtgtggccggacccagcaacatggctgtccagggaagaaactacatacct |
| | | ggacccagctaccgacaacaacgtgtctcaaccactgtgactcaaaacaacaacagcgaa |
| | | tttgcttggcctggagcttcttcttgggctctcaatggacgtaatagcttgatgaatcct |
| | | ggacctgctatggccagccacaaagaaggagaggaccgtttctttcctttgtctggatct |
| | | ttaatttttggcaaacaaggaactggaagagacaacgtggatgcggacaaagtcatgata |
| | | accaacgaagaagaaattaaaactactaacccggtagcaacggagtcctatggacaagtg |
| | | gccacaaaccaccagagtgcacaggcttatgtttcgtctgttaagatgcaggcgcagacc |
| | | ggctgggttcaaaaccaaggaatacttccgggtatggtttggcaggacagagatgtgtac |
| | | ctgcaaggacccatttgggccaaaattcctcacacggacggcaactttcacccttctccg |
| | | ctgatgggagggtttggaatgaagcacccgcctcctcagatcctcatcaaaaacacacct |
| | | gtacctgcCgatcctccaacggccttcaacaaggacaagctgaactctttcatcacccag |
| | | tattctactggccaagtcagcgtggagatcgagtgggagctgcagaaggaaaacagcaag |
| | | cgGtggaacccggagatccagtacacttccaactattacaagtctaataatgttgaattt |
| | | gctgttaatactgaaggtgtatatagtgaaccccgccccattggcaccagatacctgact |
| | | cgtaatctgtaa |
| TTD-013 | 4 | ATGGCTGCCGATGGTTATCTTCCAGATTGGCTCGAGGACAACCTTAGTGAAGGAATTCGC |
| | | GAGTGGTGGGCTTTGAAACCTGGAGCCCCTCAACCCAAGGCAAATCAACAACATCAAGAC |
| | | AACGCTCGAGGTCTTGTGCTTCCGGGTTACAAATACCTTGGACCCGGCAACGGACTCGAC |
| | | AAGGGGGAGCCGGTCAACGCAGCAGACGCGGCGGCCCTCGAGCACGACAAGGCCTACGAC |
| | | CAGCAGCTCAAGGCCGGAGACAACCCGTACCTCAAGTACAACCACGCCGACGCCGAGTTC |
| | | CAGGAGCGGCTCAAAGAAGATACGTCTTTTGGGGGCAACCTCGGGCGAGCAGTCTTCCAG |
| | | GCCAAAAAGAGGCTTCTTGAACCTCTTGGTCTGGTTGAGGAAGCGGCTAAGACGGCTCCT |
| | | GGAAAGAAGAGGCCTGTAGAGCAGTCTCCTCAGGAACCGGACTCCTCCGCGGGTATTGGC |
| | | AAATCGGGTGCACAGCCCGCTAAAAAGAGACTCAATTTCGGTCAGACTGGCGACACAGAG |
| | | TCAGTCCCAGACCCTCAACCAATCGGAGAACCTCCCGCAGCCCCCTCAGGTGTGGGATCT |
| | | CTTACAATGGCTTCAGGTGGTGGCGCACCAGTGGCAGACAATAACGAAGGTGCCGATGGA |
| | | GTGGGTAGTTCCTCGGGAAATTGGCATTGCGATTCCCAATGGCTGGGGGACAGAGTCATC |
| | | ACCACCAGCACCCGAACCTGGGCCCTGCCCACCTACAACAATCACCTCTACAAGCAAATC |
| | | TCCAACAGCACATCTGGAGGATCTTCAAATGACAACGCCTACTTCGGCTACAGCACCCCC |
| | | TGGGGGTATTTTGACTTCAACAGATTCCACTGCCACTTCTCACCACGTGACTGGCAGCGA |
| | | CTCATCAACAACAACTGGGGATTCCGGCCTAAGCGACTCAACTTCAAGCTCTTCAACATT |
| | | CAGGTCAAAGAGGTTACGGACAACAATGGAGTCAAGACCATCGCCAATAACCTTACCAGC |
| | | ACGGTCCAGGTCTTCACGGACTCAGACTATCAGCTCCCGTACGTGCTCGGGTCGGCTCAC |
| | | GAGGGCTGCCTCCCGCCGTTCCCAGCGGACGTTTTCATGATTCCTCAGTACGGGTATCTG |
| | | ACGCTTAATGATGGAAGCCAGGCCGTGGGTCGTTCGTCCTTTTACTGCCTGGAATATTTC |
| | | CCGTCGCAAATGCTAAGAACGGGTAACAACTTCCAGTTCAGCTACGAGTTTGAGAACGTA |
| | | CCTTTCCATAGCAGCTACGCTCACAGCCAAAGCCTGGACCGACTAATGAATCCACTCATC |
| | | GACCAATACTTGTACTATCTCTCAAAGACTATTAACGGTTCTGGACAGAATCAACAAACG |
| | | CTAAAATTCAGTGTGGCCGGACCCAGCAACATGGCTGTCCAGGGAAGAAACTACATACCT |
| | | GGACCCAGCTACCGACAACAACGTGTCTCAACCACTGTGACTCAAAACAACAACAGCGAA |
| | | TTTGCTTGGCCTGGAGCTTCTTCTTGGGCTCTCAATGGACGTAATAGCTTGATGAATCCT |
| | | GGACCTGCTATGGCCAGCCACAAAGAAGGAGAGGACCGTTTCTTTCCTTTGTCTGGATCT |
| | | TTAATTTTTGGCAAACAAGGAACTGGAAGAGACAACGTGGATGCGGACAAAGTCATGATA |
| | | ACCAACGAAGAAGAAATTAAAACTACTAACCCGGTAGCAACGGAGTCCTATGGACAAGTG |
| | | GCCACAAACCACCAGAGTccgcttaatggtgccgtccatctttatGCTCAGGCGCAGACC |
| | | GGCTGGGTTccgAACCAAGGAATACTTCCGGGTATGGTTTGGCAGGACAGAGATGTGTAC |
| | | CTGCAAGGACCCATTTGGGCCAAAATTCCTCACACGGACGGCAACTTTCACCCTTCTCCG |
| | | CTGATGGGAGGGTTTGGAATGAAGCACCCGCCTCCTCAGATCCTCATCAAAAACACACCT |
| | | GTACCTGCCGATCCTCCAACGGCCTTCAACAAGGACAAGCTGAACTCTTTCATCACCCAG |
| | | TATTCTACTGGCCAAGTCAGCGTGGAGATCGAGTGGGAGCTGCAGAAGGAAAACAGCAAG |
| | | CGGTGGAACCCGGAGATCCAGTACACTTCCAACTATTACAAGTCTAATAATGTTGAATTT |
| | | GCTGTTAATACTGAAGGTGTATATAGTGAACCCCGCCCCATTGGCACCAGATACCTGACT |
| | | CGTAATCTGTAA |
| TTD-014 | 7 | ATGGCTGCCGATGGTTATCTTCCAGATTGGCTCGAGGACAACCTTAGTGAAGGAATTCGC |
| | | GAGTGGTGGGCTTTGAAACCTGGAGCCCCTCAACCCAAGGCAAATCAACAACATCAAGAC |
| | | AACGCTCGAGGTCTTGTGCTTCCGGGTTACAAATACCTTGGACCCGGCAACGGACTCGAC |
| | | AAGGGGGAGCCGGTCAACGCAGCAGACGCGGCGGCCCTCGAGCACGACAAGGCCTACGAC |
| | | CAGCAGCTCAAGGCCGGAGACAACCCGTACCTCAAGTACAACCACGCCGACGCCGAGTTC |
| | | CAGGAGCGGCTCAAAGAAGATACGTCTTTTGGGGGCAACCTCGGGCGAGCAGTCTTCCAG |
| | | GCCAAAAAGAGGCTTCTTGAACCTCTTGGTCTGGTTGAGGAAGCGGCTAAGACGGCTCCT |
| | | GGAAAGAAGAGGCCTGTAGAGCAGTCTCCTCAGGAACCGGACTCCTCCGCGGGTATTGGC |
| | | AAATCGGGTGCACAGCCCGCTAAAAAGAGACTCAATTTCGGTCAGACTGGCGACACAGAG |
| | | TCAGTCCCAGACCCTCAACCAATCGGAGAACCTCCCGCAGCCCCCTCAGGTGTGGGATCT |
| | | CTTACAATGGCTTCAGGTGGTGGCGCACCAGTGGCAGACAATAACGAAGGTGCCGATGGA |
| | | GTGGGTAGTTCCTCGGGAAATTGGCATTGCGATTCCCAATGGCTGGGGGACAGAGTCATC |
| | | ACCACCAGCACCCGAACCTGGGCCCTGCCCACCTACAACAATCACCTCTACAAGCAAATC |
| | | TCCAACAGCACATCTGGAGGATCTTCAAATGACAACGCCTACTTCGGCTACAGCACCCCC |
| | | TGGGGGTATTTTGACTTCAACAGATTCCACTGCCACTTCTCACCACGTGACTGGCAGCGA |
| | | CTCATCAACAACAACTGGGGATTCCGGCCTAAGCGACTCAACTTCAAGCTCTTCAACATT |
| | | CAGGTCAAAGAGGTTACGGACAACAATGGAGTCAAGACCATCGCCAATAACCTTACCAGC |
| | | ACGGTCCAGGTCTTCACGGACTCAGACTATCAGCTCCCGTACGTGCTCGGGTCGGCTCAC |
| | | GAGGGCTGCCTCCCGCCGTTCCCAGCGGACGTTTTCATGATTCCTCAGTACGGGTATCTG |
| | | ACGCTTAATGATGGAAGCCAGGCCGTGGGTCGTTCGTCCTTTTACTGCCTGGAATATTTC |
| | | CCGTCGCAAATGCTAAGAACGGGTAACAACTTCCAGTTCAGCTACGAGTTTGAGAACGTA |
| | | CCTTTCCATAGCAGCTACGCTCACAGCCAAAGCCTGGACCGACTAATGAATCCACTCATC |
| | | GACCAATACTTGTACTATCTCTCAAAGACTATTAACGGTTCTGGACAGAATCAACAAACG |
| | | CTAAAATTCAGTGTGGCCGGACCCAGCAACATGGCTGTCCAGGGAAGAAACTACATACCT |
| | | GGACCCAGCTACCGACAACAACGTGTCTCAACCACTGTGACTCAAAACAACAACAGCGAA |
| | | TTTGCTTGGCCTGGAGCTTCTTCTTGGGCTCTCAATGGACGTAATAGCTTGATGAATCCT |
| | | GGACCTGCTATGGCCAGCCACAAAGAAGGAGAGGACCGTTTCTTTCCTTTGTCTGGATCT |
| | | TTAATTTTTGGCAAACAAGGAACTGGAAGAGACAACGTGGATGCGGACAAAGTCATGATA |
| | | ACCAACGAAGAAGAAATTAAAACTACTAACCCGGTAGCAACGGAGTCCTATGGACAgGTc |
| | | GCtACGAATCATCAGTCTCCGCTGAATGGTGCGGTGCATCTGTATGCGCAGGCGCAGCTG |
| | | TCTCCGGTGAAGAATcaaggaatacttccgggtatgGTTTGGCAGGACAGAGATGTGTAC |
| | | CTGCAAGGACCCATTTGGGCCAAAATTCCTCACACGGACGGCAACTTTCACCCTTCTCCG |
| | | CTGATGGGAGGGTTTGGAATGAAGCACCCGCCTCCTCAGATCCTCATCAAAAACACACCT |
| | | GTACCTGCCGATCCTCCAACGGCCTTCAACAAGGACAAGCTGAACTCTTTCATCACCCAG |
| | | TATTCTACTGGCCAAGTCAGCGTGGAGATCGAGTGGGAGCTGCAGAAGGAAAACAGCAAG |
| | | CGGTGGAACCCGGAGATCCAGTACACTTCCAACTATTACAAGTCTAATAATGTTGAATTT |
| | | GCTGTTAATACTGAAGGTGTATATAGTGAACCCCGCCCCATTGGCACCAGATACCTGACT |
| | | CGTAATCTGTAA |

[0751] In some embodiments, an AAV capsid polypeptide, e.g., an AAV capsid variant, described herein comprises the amino acid sequence of any one of SEQ ID NOs: 3636-3647, or an amino acid sequence with at least 80% (e.g., at least about 85, 90, 95, 96, 97, 98, or 99%) sequence identity thereto. In some embodiments, an AAV capsid variant described herein comprises the amino acid sequence of SEQ ID NO: 3636, or an amino acid sequence with at least 80% (e.g., at least about 85, 90, 95, 96, 97, 98, or 99%) sequence identity thereto. In some embodiments, an AAV capsid variant described herein comprises the amino acid sequence of SEQ ID NO: 3639, or an amino acid sequence with at least 80% (e.g., at least about 85, 90, 95, 96, 97, 98, or 99%) sequence identity thereto.

[0752] In some embodiments, the polynucleotide encoding an AAV capsid polypeptide, e.g., AAV capsid variant, described herein comprises the nucleotide sequence of any one of SEQ ID NOs: 3623-3635, or a nucleotide sequence with at least 80% (e.g., at least about 85, 90, 95, 96, 97, 98, or 99%) sequence identity thereto. In some embodiments, the polynucleotide encoding an AAV capsid variant described herein comprises the nucleotide sequence of SEQ ID NO: 3623, or a nucleotide sequence with at least 80% (e.g., at least about 85, 90, 95, 96, 97, 98, or 99%) sequence identity thereto. In some embodiments, the polynucleotide encoding an AAV capsid variant described herein comprises the nucleotide sequence of SEQ ID NO: 3627, or a nucleotide sequence with at least 80% (e.g., at least about 85, 90, 95, 96, 97, 98, or 99%) sequence identity thereto. In some embodiments, the nucleic acid sequence encoding an AAV capsid polypeptide, e.g., an AAV capsid variant, described herein is codon optimized.

[0753] In some embodiments, the AAV capsid polypeptide, e.g., the AAV capsid variant, comprises a VP2 protein comprising the amino acid sequence corresponding to positions 138-743, of any one of SEQ ID NOs: 3636-3647, or a sequence with at least 80% (e.g., at least about 85, 90, 95, %, 97, 98, or 99%) sequence identity thereto. In some embodiments, the AAV capsid comprises a VP3 protein comprising the amino acid sequence corresponding to positions 203-743, of any one of SEQ ID NOs: 3636-3647, or a sequence with at least 80% (e.g., at least about 85, 90, 95, %, 97, 98, or 99%) sequence identity thereto.

[0754] In some embodiments, the AAV capsid polypeptide, e.g., the AAV capsid variant, e.g., an AAV capsid variant described herein, comprises the amino acid sequence of any one of SEQ ID NOs: 3636-3647, or an amino acid sequence with at least 80% (e.g., at least about 85, 90, 95, 96, 97, 98, or 99%) sequence identity thereto. In some embodiments, the AAV capsid polypeptide, e.g., the AAV capsid variant, e.g., an AAV capsid variant described herein, comprises an amino acid sequence comprising at least one, two, or three modifications, substitutions (e.g., conservative substitutions), insertions, or deletions, but not more than 30, 20 or 10 modifications, substitutions (e.g., conservative substitutions), insertions, or deletions relative to the amino acid sequence of any one of SEQ ID NOs: 3636-3647. In some embodiments, the AAV capsid polypeptide, e.g., the AAV capsid variant, e.g., an AAV capsid variant described herein, comprises an amino acid sequence having at least one, two, or three but no more than 30, 20, or 10 different amino acids relative to the amino acid sequence of any one of SEQ ID NOs: 3636-3647.

[0755] In some embodiments, the AAV capsid polypeptide, e.g., the AAV capsid variant, e.g., an AAV capsid variant described herein, comprises the amino acid sequence of SEQ ID NO: 3636, or an amino acid sequence with at least 80% (e.g., at least about 85, 90, 95, 96, 97, 98, or 99%) sequence identity thereto. In some embodiments, the AAV capsid polypeptide, e.g., the AAV capsid variant, e.g., an AAV capsid variant described herein, comprises an amino acid sequence comprising at least one, two, or three modifications, substitutions (e.g., conservative substitutions), insertions, or deletions, but not more than 30, 20 or 10 modifications, substitutions (e.g., conservative substitutions), insertions, or deletions relative to the amino acid sequence of SEQ ID NO: 3636. In some embodiments, the AAV capsid polypeptide, e.g., the AAV capsid variant, e.g., an AAV capsid variant described herein, comprises an amino acid sequence having at least one, two, or three but no more than 30, 20, or 10 different amino acids relative to the amino acid sequence of SEQ ID NO: 3636.

[0756] In some embodiments, an AAV capsid polypeptide, e.g., an AAV capsid variant, described herein has an increased tropism for a CNS cell or tissue, e.g., a brain cell, brain tissue, spinal cord cell, or spinal cord tissue, relative to the tropism of a reference sequence comprising the amino acid sequence of SEQ ID NO: 138.

[0757] In some embodiments, an AAV capsid polypeptide, e.g., an AAV capsid variant, described herein transduces a brain region, e.g., selected from dentate nucleus, cerebellar cortex, cerebral cortex, brain stem, hippocampus, thalamus and putamen. In some embodiments, the level of transduction of said brain region is at least 5, 10, 50, 100, 200, 500, 1,000, 2,000, 5,000, or 10,000-fold greater as compared to a reference sequence of SEQ ID NO: 138.

[0758] In some embodiments, an AAV capsid polypeptide, e.g., an AAV capsid variant, described herein is enriched at least about 5, 6, 7, 8, 9, or 10-fold, in the brain compared to a reference sequence of SEQ ID NO: 138. In some embodiments, an AAV capsid variant described herein is enriched at least about 20, 30, 40, or 50-fold in the brain compared to a reference sequence of SEQ ID NO: 138. In some embodiments, an AAV capsid variant described herein is enriched at least about 100, 200, 300, or 400-fold in the brain compared to a reference sequence of SEQ ID NO: 138.

[0759] In some embodiments, an AAV capsid polypeptide, e.g., an AAV capsid variant, described herein delivers an increased level of viral genomes to a brain region. In some embodiments, the level of viral genomes is increased by at least 5, 10, 20, 30, 40 or 50-fold, as compared to a reference sequence of SEQ ID NO: 138. In some embodiments, the brain region comprises a frontal cortex, sensory cortex, motor cortex, putamen, thalamus, cerebellar cortex, dentate nucleus, caudate, and/or hippocampus.

[0760] In some embodiments, an AAV capsid polypeptide, e.g., an AAV capsid variant, described herein delivers an increased level of a payload to a brain region. In some embodiments, the level of the payload is increased by at least 5, 10, 50, 100, 200, 500, 1,000, 2,000, 5,000, or 10,000-fold, as compared to a reference sequence of SEQ ID NO: 138. In some embodiments, the brain region comprises a frontal cortex, sensory cortex, motor cortex, putamen, thalamus, cerebellar cortex, dentate nucleus, caudate, and/or hippocampus.

[0761] In some embodiments, an AAV capsid polypeptide, e.g., an AAV capsid variant, described herein delivers an increased level of a payload to a spinal cord region. In some embodiments, the level of the payload is increased by at least 10, 20, 50, 100, 200, 300, 400, 500, 600, 700, 800 or 900-fold, as compared to a reference sequence of SEQ ID NO: 138. In some embodiments, the spinal cord region comprises a cervical, thoracic, and/or lumbar region.

[0762] In some embodiments, an AAV capsid polypeptide, e.g., an AAV capsid variant, described herein shows preferential transduction in a brain region relative to the transduction in the dorsal root ganglia (DRG).

[0763] In some embodiments, an AAV capsid polypeptide, e.g., an AAV capsid variant, described herein has an increased tropism for a muscle cell or tissue, e.g., a heart cell or tissue, relative to the tropism of a reference sequence comprising the amino acid sequence of SEQ ID NO: 138. In some embodiments, the AAV capsid variant delivers an increased level of a payload to a muscle region. In some embodiments, the payload is increased by at least 10, 15, 20, 30, or 40-fold, as compared to a reference sequence of SEQ ID NO: 138. In some embodiments, the muscle region comprises a heart muscle, quadriceps muscle, and/or a diaphragm muscle region. In some embodiments, the muscle region comprises a heart muscle region, e.g., a heart atrium muscle region or a heart ventricle muscle region.

[0764] In some embodiments, an AAV capsid polypeptide, e.g., an AAV capsid variant described herein results in greater than 1, 2, 5, 10, 20, 30, 40, 50, or 100 reads per sample, e.g., when analyzed by an NGS sequencing assay.

[0765] In some embodiments, an AAV capsid polypeptide, e.g., an AAV capsid variant, of the present disclosure has decreased tropism for the liver. In some embodiments, an AAV capsid variant comprises a modification, e.g., substitution (e.g., conservative substitution), insertion, or deletion, that results in reduced tropism (e.g., de-targeting) and/or activity in the liver. In some embodiments, the reduced tropism in the liver is compared to an otherwise similar capsid that does not comprise the modification, e.g., a wild-type capsid polypeptide. In some embodiments, an AAV capsid variant described comprises a modification, e.g., substitution (e.g., conservative substitution), insertion, or deletion, that results in one or more of the following properties: (1) reduced tropism in the liver, (2) de-targeted expression in the liver; (3) reduced activity in the liver; and/or (4) reduced binding to galactose. In some embodiments, the reduction in any one, or all of properties (1)-(3) is compared to an otherwise similar AAV capsid variant that does not comprise the modification. Exemplary modifications are provided in WO 2018/119330; Pulicherla et al. (2011) Mol. Ther. 19(6): 1070-1078; Adachi et al. (2014) Nature Communications 5(3075), DOI: 10.1038/ncomms4075; and Bell et al. (2012) J. Virol. 86(13): 7326-33; the contents of which are hereby incorporated by reference in their entirety. In some embodiments, the AAV capsid variant comprises a modification e.g., substitution (e.g., conservative substitution), insertion, or deletion, at position N470 (e.g., N470A), D271 (e.g., D271A), N272 (e.g., N297A), Y446 (e.g., Y446A), N498 (e.g., N498Y or N498I), W503 (e.g., W530R or W530A), L620 (e.g., L620F), or a combination thereof, relative to a reference sequence numbered according to SEQ ID NO: 138. In some embodiments, the AAV capsid variant comprises one, two, three, four, five or all of an amino acid other than N at position 470 (e.g., A), an amino acid other than D at position 271 (e.g., A), an amino acid other than N at position 272 (e.g., A), an amino acid other than Y at position 446 (e.g., A), and amino acid other than N at position 498/ (e.g., Y or I), and amino acid other than W at position 503 (e.g., R or A), and amino acid other than L at position 620 (e.g., F), relative to a reference sequence numbered according to SEQ ID NO: 138. In some embodiments, the AAV capsid variant comprises a modification e.g., substitution (e.g., conservative substitution), insertion, or deletion, at position N470 (e.g., N470A), D271 (e.g., D271A), N272 (e.g., N297A), Y446 (e.g., Y446A), and W503 (e.g., W530R or W530A), relative to a reference sequence numbered according to SEQ ID NO: 138. In some embodiments, the AAV capsid variant comprises a modification e.g., substitution (e.g., conservative substitution), insertion, or deletion, at N498 (e.g., N498Y) and L620 (e.g., L620F).

[0766] In some embodiments, an AAV capsid variant comprised herein comprises a modification as described in Adachi et al. (2014) Nature Communications 5(3075), DOI: 10.1038/ncomms4075, the contents of which are hereby incorporated by reference in its entirety. Exemplary modifications that alter or do not alter tissue transduction in at least the brain, liver, heart, lung, and/or kidney can be found in Supplementary Data 2 showing the AAV Barcode-Seq data obtained with AAV9-AA-VBCLib of Adachi et al. (supra), the contents of which are hereby incorporated by reference in its entirety.

[0767] In some embodiments, an, AAV capsid polypeptide, e.g., an AAV capsid variant, of the present disclosure is isolated, e.g., recombinant. In some embodiments, a polynucleotide encoding an AAV capsid polypeptide, e.g., an AAV capsid variant, of the present disclosure is isolated, e.g., recombinant.

[0768] The present disclosure refers to structural capsid proteins (including VP1, VP2 and VP3) which are encoded by capsid (Cap) genes. These capsid proteins form an outer protein structural shell (i.e. capsid) of a viral vector such as AAV. VP capsid proteins synthesized from Cap polynucleotides generally include a methionine as the first amino acid in the peptide sequence (Met1), which is associated with the start codon (AUG or ATG) in the corresponding Cap nucleotide sequence. However, it is common for a first-methionine (Met1) residue or generally any first amino acid (AA1) to be cleaved off after or during polypeptide synthesis by protein processing enzymes such as Met-aminopeptidases. This “Met/AA-clipping” process often correlates with a corresponding acetylation of the second amino acid in the polypeptide sequence (e.g., alanine, valine, serine, threonine, etc.). Met-clipping commonly occurs with VP1 and VP3 capsid proteins but can also occur with VP2 capsid proteins.

[0769] Where the Met/AA-clipping is incomplete, a mixture of one or more (one, two or three) VP capsid proteins comprising the viral capsid may be produced, some of which may include a Met1/AA1 amino acid (Met+/AA+) and some of which may lack a Met1/AA1 amino acid as a result of Met/AA-clipping (Met−/AA−). For further discussion regarding Met/AA-clipping in capsid proteins, see Jin, et al. Direct Liquid Chromatography/Mass Spectrometry Analysis for Complete Characterization of Recombinant Adeno-Associated Virus Capsid Proteins. Hum Gene Ther Methods. 2017-10-28(5):255-267; Hwang, et al. N-Terminal Acetylation of Cellular Proteins Creates Specific Degradation Signals. Science. 2010 Feb. 19. 327(5968): 973-977; the contents of which are each incorporated herein by reference in their entirety.

[0770] According to the present disclosure, references to capsid proteins is not limited to either clipped (Met−/AA−) or unclipped (Met+/AA+) and may, in context, refer to independent capsid proteins, viral capsids comprised of a mixture of capsid proteins, and/or polynucleotide sequences (or fragments thereof) which encode, describe, produce or result in capsid proteins of the present disclosure. A direct reference to a “capsid protein” or “capsid polypeptide” (such as VP1, VP2 or VP2) may also comprise VP capsid proteins which include a Met1/AA1 amino acid (Met+/AA+) as well as corresponding VP capsid proteins which lack the Met1/AA1 amino acid as a result of Met/AA-clipping (Met−/AA−).

[0771] Further according to the present disclosure, a reference to a specific “SEQ ID NO:” (whether a protein or nucleic acid) which comprises or encodes, respectively, one or more capsid proteins which include a Met1/AA1 amino acid (Met+/AA+) should be understood to teach the VP capsid proteins which lack the Met1/AA1 amino acid as upon review of the sequence, it is readily apparent any sequence which merely lacks the first listed amino acid (whether or not Met1/AA1).

[0772] As a non-limiting example, reference to a VP1 polypeptide sequence which is 736 amino acids in length and which includes a “Met1” amino acid (Met+) encoded by the AUG/ATG start codon may also be understood to teach a VP1 polypeptide sequence which is 735 amino acids in length and which does not include the “Met1” amino acid (Met−) of the 736 amino acid Met+ sequence. As a second non-limiting example, reference to a VP1 polypeptide sequence which is 736 amino acids in length and which includes an “AA1” amino acid (AA1+) encoded by any NNN initiator codon may also be understood to teach a VP1 polypeptide sequence which is 735 amino acids in length and which does not include the “AA1” amino acid (AA1−) of the 736 amino acid AA1+ sequence.

[0773] References to viral capsids formed from VP capsid proteins (such as reference to specific AAV capsid serotypes), can incorporate VP capsid proteins which include a Met1/AA1 amino acid (Met+/AA1+), corresponding VP capsid proteins which lack the Met1/AA1 amino acid as a result of Met/AA1-clipping (Met−/AA1−), and combinations thereof (Met+/AA1+ and Met−/AA1−).

[0774] As a non-limiting example, an AAV capsid serotype can include VP1 (Met+/AA1+), VP1 (Met−/AA1−), or a combination of VP1 (Met+/AA1+) and VP1 (Met−/AA1−). An AAV capsid serotype can also include VP3 (Met+/AA1+), VP3 (Met−/AA1−), or a combination of VP3 (Met+/AA1+) and VP3 (Met−/AA1−); and can also include similar optional combinations of VP2 (Met+/AA1) and VP2 (Met−/AA1−).

[0775] Also provided herein are polynucleotide sequences encoding any of the AAV capsid variants described above and AAV particles, vectors, and cells comprising the same.

### AAV Viral Genome

[0776] In some aspects, the AAV particle of the present disclosure serves as an expression vector comprising a viral genome which encodes a GCase protein. The viral genome can encode a GCase protein and an enhancement, e.g., prosaposin (PSAP) or sapsosin (Sap) polypeptide or functional variant thereof (e.g., a SapA protein or a SapC protein), a cell penetrating peptide (e.g., an ApoEII peptide, a TAT peptide, or an ApoB peptide), a lysosomal targeting sequence (LTS), or a combination thereof. In some embodiments, expression vectors are not limited to AAV and may be adenovirus, retrovirus, lentivirus, plasmid, vector, or any variant thereof.

[0777] In some embodiments, an AAV particle, e.g., an AAV particle for the vectorized delivery of a GBA protein described herein, comprises a viral genome, e.g., an AAV viral genome (e.g., a vector genome or AAV vector genome). In some embodiments, the viral genome, e.g., the AAV viral genome, further comprises an inverted terminal repeat (ITR) region, an enhancer, a promoter, an intron region, a Kozak sequence, an exon region, a nucleic acid encoding a transgene encoding a payload (e.g., a GBA protein described herein) with or without an enhancement element, a nucleotide sequence encoding a miR binding site (e.g., a miR183 binding site), a poly A signal region, or a combination thereof.

### Viral Genome Component: Inverted Terminal Repeats (ITRs)

[0778] In some embodiments, the viral genome may comprise at least one inverted terminal repeat (ITR) region. The AAV particles of the present disclosure comprise a viral genome with at least one ITR region and a payload region. In some embodiments, the viral genome has two ITRs. These two ITRs flank the payload region at the 5′ and 3′ ends. In some embodiments, the ITR functions as an origin of replication comprising a recognition site for replication. In some embodiments, the ITR comprises a sequence region which can be complementary and symmetrically arranged. In some embodiments, the ITR incorporated into a viral genome described herein may be comprised of a naturally occurring polynucleotide sequence or a recombinantly derived polynucleotide sequence.

[0779] The ITRs may be derived from the same serotype as the capsid, selected from any of the serotypes listed in Table 1, or a derivative thereof. The ITR may be of a different serotype than the capsid. In some embodiments, the AAV particle has more than one ITR. In a non-limiting example, the AAV particle has a viral genome comprising two ITRs. In some embodiments, the ITRs are of the same serotype as one another. In another embodiment, the ITRs are of different serotypes. Non-limiting examples include zero, one or both of the ITRs having the same serotype as the capsid. In some embodiments both ITRs of the viral genome of the AAV particle are AAV2 ITRs.

[0780] In some embodiments, the ITR comprises the nucleotide sequence of any one of SEQ ID NOs: 1829, 1830, or 1862, or a nucleotide sequence substantially identical (e.g., at least 70%, 75%, 80%, 85%, 90%, 95%, 99% or 100% identical) to any of the aforesaid sequences. In some embodiments, the ITR comprises the nucleotide sequence of any of SEQ ID NOs: 1860, 1861, 1863, or 1864, or a nucleotide sequence having one, two, or three but no more than four modifications, e.g., substitutions, relative to SEQ ID NOs: 1860, 1861, 1863, or 1864.

### Viral Genome Component: Promoters and Expression Enhancers

[0781] In some embodiments, the payload region of the viral genome comprises at least one element to enhance the transgene target specificity and expression. See, e.g., Powell et al. Viral Expression Cassette Elements to Enhance Transgene Target Specificity and Expression in Gene Therapy, 2015; the contents of which are herein incorporated by reference in their entirety. Non-limiting examples of elements to enhance the transgene target specificity and expression include promoters, endogenous miRNAs, post-transcriptional regulatory elements (PREs), polyadenylation (PolyA) signal sequences, upstream enhancers (USEs), CMV enhancers, and introns.

[0782] In some embodiments, expression of the polypeptides in a target cell may be driven by a specific promoter, including but not limited to, a promoter that is species specific, inducible, tissue-specific, or cell cycle-specific (Parr et al., Nat. Med. 3:1145-9 (1997); the contents of which are herein incorporated by reference in their entirety).

[0783] In some embodiments, the viral genome comprises a that is sufficient for expression, e.g., in a target cell, of a payload (e.g., a GBA protein) encoded by a transgene. In some embodiments, the promoter is deemed to be efficient when it drives expression of the polypeptide(s) encoded in the payload region of the viral genome of the AAV particle.

[0784] In some embodiments, the promoter is a promoter deemed to be efficient when it drives expression in the cell or tissue being targeted.

[0785] In some embodiments, the promoter drives expression of the GCase, GCase and SapA, or GCase and SapC protein(s) for a period of time in targeted tissues.

[0786] Promoters may be naturally occurring or non-naturally occurring. Non-limiting examples of promoters include viral promoters, plant promoters and mammalian promoters. In some embodiments, the promoters may be human promoters. In some embodiments, the promoter may be truncated.

[0787] In some embodiments, the viral genome comprises a promoter that results in expression in one or more, e.g., multiple, cells and/or tissues, e.g., a ubiquitous promoter. In some embodiments, a promoter which drives or promotes expression in most mammalian tissues includes, but is not limited to, human elongation factor 1α-subunit (EF1α), cytomegalovirus (CMV) immediate-early enhancer and/or promoter, chicken β-actin (CBA) and its derivative CAG, β glucuronidase (GUSB), and ubiquitin C (UBC). Tissue-specific expression elements can be used to restrict expression to certain cell types such as, but not limited to, CNS-specific promoters, B cell promoters, monocyte promoters, leukocyte promoters, macrophage promoters, pancreatic acinar cell promoters, endothelial cell promoters, lung tissue promoters, astrocyte promoters, or various specific nervous system cell- or tissue-type promoters which can be used to restrict expression to neurons, astrocytes, or oligodendrocytes, for example.

[0788] In some embodiments, the viral genome comprises a nervous system specific promoter, e.g., a promoter that results in expression of a payload in a neuron, an astrocyte, and/or an oligodendrocyte. Non-limiting examples of tissue-specific expression elements for neurons include neuron-specific enolase (NSE), platelet-derived growth factor (PDGF), platelet-derived growth factor B-chain (PDGF-0), synapsin (Syn), synapsin 1 (Syn1), methyl-CpG binding protein 2 (MeCP2), Ca²⁺/calmodulin-dependent protein kinase II (CaMKII), metabotropic glutamate receptor 2 (mGluR2), neurofilament light (NFL) or heavy (NFH), β-globin minigene nβ2, preproenkephalin (PPE), enkephalin (Enk) and excitatory amino acid transporter 2 (EAAT2) promoters. Non-limiting examples of tissue-specific expression elements for astrocytes include glial fibrillary acidic protein (GFAP) and EAAT2 promoters. A non-limiting example of a tissue-specific expression element for oligodendrocytes includes the myelin basic protein (MBP) promoter. Prion promoter represents an additional tissue specific promoter useful for driving protein expression in CNS tissue (see Loftus, Stacie K., et al. Human molecular genetics 11.24 (2002): 3107-3114, the disclosure of which is incorporated by reference in its entirety).

[0789] In some embodiments, the promoter may be a combination of two or more components of the same or different starting or parental promoters such as, but not limited to, CMV and CBA. In some embodiments, the promoter is a combination of a 382 nucleotide CMV-enhancer sequence and a 260 nucleotide CBA-promoter sequence.

[0790] In some embodiments, the viral genome comprises a ubiquitous promoter. Non-limiting examples of ubiquitous promoters include CMV, CBA (including derivatives CAG, CB6, CBh, etc.), EF-1α, PGK, UBC, GUSB (hGBp), and UCOE (promoter of HNRPA2B1-CBX3). In some embodiments, the viral genome comprises an EF-1α promoter or EF-1α promoter variant, e.g., as provided in Table 40. In some embodiments, the EF-1α promoter comprises the nucleotide sequence ofany one of SEQ ID NOs: 1874-1889 or any of the sequences provided in Table 40, a nucleotide sequence comprising at least one, two, or three but no more than four modifications, e.g., substitutions, relative to the nucleotide sequence of SEQ ID NOs: 1874-1889 or any of the sequences provided in Table 40, or a nucleotide sequence with at least 80% (e.g., 85%, 90%, 95%, 96%, 97%, 98%, or 99%/) sequence identity to any one of SEQ ID NOs: 1874-1889 or any of the sequences provided in Table 40.

TABLE 40
Exemplary Promoter Variants

| | | SEQ ID |
|---|---|---|
| Description | Sequences | NO: |
| EF1a Promoter | CGTGAGGCTCCGGTGCCCGTCAGTGGGCAGAGCGCACATCGCCCACAGTCCCCG | 1874 |
| (intron | AGAAGTTGGGGGGAGGGGTCGGCAATTGAACCGGTGCCTAGAGAAGGTGGCGCG | |
| underlined) | GGGTAAACTGGGAAAGTGATGTCGTGTACTGGCTCCGCCTTTTTCCCGAGGGTG | |
| | GGGGAGAACCGTATATAAGTGCAGTAGTCGCCGTGAACGTTCTTTTTCGCAACG | |
| | GGTTTGCCGCCAGAACACAGGTAAGTGCCGTGTGTGGTTCCCGCGGGCCTGGCC | |
| | TCTTTACGGGTTATGGCCCTTGCGTGCCTTGAATTACTTCCACCTGGCTGCAGT | |
| | ACGTGATTCTTGATCCCGAGCTTCGGGTTGGAAGTGGGTGGGAGAGTTCGAGGC | |
| | CTTGCGCTTAAGGAGCCCCTTCGCCTCGTGCTTGAGTTGAGGCCTGGCCTGGGC | |
| | GCTGGGGCCGCCGCGTGCGAATCTGGTGGCACCTTCGCGCCTGTCTCGCTGCTT | |
| | TCGATAAGTCTCTAGCCATTTAAAATTTTTGATGACCTGCTGCGACGCTTTTTT | |
| | TCTGGCAAGATAGTCTTGTAAATGCGGGCCAAGATCTGCACACTGGTATTTCGG | |
| | TTTTTGGGGCCGCGGGCGGCGACGGGGCCCGTGCGTCCCAGCGCACATGTTCGG | |
| | CGAGGCGGGGCCTGCGAGCGCGGCCACCGAGAATCGGACGGGGGTAGTCTCAAG | |
| | CTGGCCGGCCTGCTCTGGTGCCTGGCCTCGCGCCGCCGTGTATCGCCCCGCCCT | |
| | GGGCGGCAAGGCTGGCCCGGTCGGCACCAGTTGCGTGAGCGGAAAGATGGCCGC | |
| | TTCCCGGCCCTGCTGCAGGGAGCTCAAAATGGAGGACGCGGCGCTCGGGAGAGC | |
| | GGGCGGGTGAGTCACCCACACAAAGGAAAAGGGCCTTTCCGTCCTCAGCCGTCG | |
| | CTTCATGTGACTCCACGGAGTACCGGGCGCCGTCCAGGCACCTCGATTAGTTCT | |
| | CGAGCTTTTGGAGTACGTCGTCTTTAGGTTGGGGGGAGGGGTTTTATGCGATGG | |
| | AGTTTCCCCACACTGAGTGGGTGGAGACTGAAGTTAGGCCAGCTTGGCACTTGA | |
| | TGTAATTCTCCTTGGAATTTGCCCTTTTTGAGTTTGGATCTTGGTTCATTCTCA | |
| | AGCCTCAGACAGTGGTTCAAAGTTTTTTTCTTCCATTTCAGGTGTCGTGA | |
| miniEF1a | GCCCGTCAGTGGGCAGAGCGCACATCGCCCACAGTCCCCGAGAAGTTGGGGGGA | 1875 |
| | GGGGTCGGCAATTGAACCGGTGCCTAGAGAAGGTGGCGCGGGGTAAACTGGGAA | |
| | AGTGATGTCGTGTACTGGCTCCGCCTTTTTCCCGAGGGTGGGGGAGAACCGTAT | |
| | ATAAGTGCAGTAGTCGCCGTGAACGTTCTTTTTCGCAACGGGTTTGCCGCCAGA | |
| | ACACGCGTAAG | |
| Promoter | GCATG | |
| Variant 1 | | |
| Promoter | GGTGGAGAAGAGCATG | 1876 |
| Variant 2 | | |
| Promoter | GTCATCACTGAGGTGGAGAAGAGCATG | 1877 |
| Variant 3 | | |
| Promoter | CGTGAG | |
| Variant 4 | | |
| Promoter | GT | |
| Variant 5 | | |
| Promoter | GCTCCGGT | |
| Variant 6 | | |
| Promoter | GCCCGTCAGTGGGCAGAGCGCACATCGCCCACAGTCCCCGAGAAGTTGGGGGGA | 1878 |
| Variant 19 | GGGGTCGGCAATTGAACCGGTGCCTAGAGAAGGTGGCGCGGGGTAAACTGGGAA | |
| | AGTGATGTCGTGTACTGGCTCCGCCTTTTTCCCGAGGGTGGGGGAGAACCGTAT | |
| | ATAAGTGCAGTAGTCGCCGTGAACGTTCTTTTTCGCAACGGGTTTGCCGCCAGA | |
| | ACACAG | |
| Promoter | GCCCGTCAGTGGGCAGAGCGCACATCGCCCACAGTCCCCGAGAAGTTGGGGGGA | 1879 |
| Variant 20 | GGGGTCGGCAATTGAACCGGTGCCTAGAGAAGGTGGCGCGGGGTAAACTGGGAA | |
| | AGTGATGTCGTGTACTGGCTCCGCCTTTTTCCCGAGGGTGGGGGAGAACCGTAT | |
| | ATAAGTGCAGTAGTCGCCGTGAACGTTCTTTTTCGCAACGGGTTTGCCGCCAGA | |
| | ACACGC | |
| Promoter | GTAAG | |
| Variant 7 | | |
| Promoter | GTGCCCGTCAGTGGGCAGAGCGCACATCGCCCACAGTCCCCGAGAAGTTGGGGG | 1880 |
| Variant 8 | GAGGGGTCGGCAATTGAACCGGTGCCTAGAGAAGGTGGCGCGGGGTAAACTGGG | |
| | AAAGTGATGTCGTGTACTGGCTCCGCCTTTTTCCCGAGGGTGGGGGAGAACCGT | |
| | ATATAAGTGCAGTAGTCGCCGTGAACGTTCTTTTTCGCAACGGGTTTGCCGCCA | |
| | GAACACGCGTAAG | |
| Promoter | GCTCCGGTGCCCGTCAGTGGGCAGAGCGCACATCGCCCACAGTCCCCGAGAAGT | 1881 |
| Variant | TGGGGGGAGGGGTCGGCAATTGAACCGGTGCCTAGAGAAGGTGGCGCGGGGTAA | |
| 9 | ACTGGGAAAGTGATGTCGTGTACTGGCTCCGCCTTTTTCCCGAGGGTGGGGGAG | |
| | AACCGTATATAAGTGCAGTAGTCGCCGTGAACGTTCTTTTTCGCAACGGGTTTG | |
| | CCGCCAGAACACGCGTAAG | |
| Promoter | CGTGAGGCTCCGGTGCCCGTCAGTGGGCAGAGCGCACATCGCCCACAGTCCCCG | 1882 |
| Variant | AGAAGTTGGGGGGAGGGGTCGGCAATTGAACCGGTGCCTAGAGAAGGTGGCGCG | |
| 10 | GGGTAAACTGGGAAAGTGATGTCGTGTACTGGCTCCGCCTTTTTCCCGAGGGTG | |
| | GGGGAGAACCGTATATAAGTGCAGTAGTCGCCGTGAACGTTCTTTTTCGCAACG | |
| | GGTTTGCCGCCAGAACACGCGTAAG | |
| Promoter | CGTGAGGCTCCGGTGCCCGTCAGTGGGCAGAGCGCACATCGCCCACAGTCCCCG | 1883 |
| Variant 11 | AGAAGTTGGGGGGAGGGGTCGGCAATTGAACCGGTGCCTAGAGAAGGTGGCGCG | |
| | GGGTAAACTGGGAAAGTGATGTCGTGTACTGGCTCCGCCTTTTTCCCGAGGGTG | |
| | GGGGAGAACCGTATATAAGTGCAGTAGTCGCCGTGAACGTTCTTTTTCGCAACG | |
| | GGTTTGCCGCCAGAACACAG | |
| Promoter | GCATGCGTGAGGCTCCGGTGCCCGTCAGTGGGCAGAGCGCACATCGCCCACAGT | 1884 |
| Variant | CCCCGAGAAGTTGGGGGGAGGGGTCGGCAATTGAACCGGTGCCTAGAGAAGGTG | |
| 12 | GCGCGGGGTAAACTGGGAAAGTGATGTCGTGTACTGGCTCCGCCTTTTTCCCGA | |
| | GGGTGGGGGAGAACCGTATATAAGTGCAGTAGTCGCCGTGAACGTTCTTTTTCG | |
| | CAACGGGTTTGCCGCCAGAACACGCGTAAG | |
| Promoter | GCATGCGTGAGGCTCCGGTGCCCGTCAGTGGGCAGAGCGCACATCGCCCACAGT | 1885 |
| Variant | CCCCGAGAAGTTGGGGGGAGGGGTCGGCAATTGAACCGGTGCCTAGAGAAGGTG | |
| 13 | GCGCGGGGTAAACTGGGAAAGTGATGTCGTGTACTGGCTCCGCCTTTTTCCCGA | |
| | GGGTGGGGGAGAACCGTATATAAGTGCAGTAGTCGCCGTGAACGTTCTTTTTCG | |
| | CAACGGGTTTGCCGCCAGAACACAG | |
| Promoter | GGTGGAGAAGAGCATGCGTGAGGCTCCGGTGCCCGTCAGTGGGCAGAGCGCACA | 1886 |
| Variant | TCGCCCACAGTCCCCGAGAAGTTGGGGGGAGGGGTCGGCAATTGAACCGGTGCC | |
| 14 | TAGAGAAGGTGGCGCGGGGTAAACTGGGAAAGTGATGTCGTGTACTGGCTCCGC | |
| | CTTTTTCCCGAGGGTGGGGGAGAACCGTATATAAGTGCAGTAGTCGCCGTGAAC | |
| | GTTCTTTTTCGCAACGGGTTTGCCGCCAGAACACGCGTAAG | |
| Promoter | GGTGGAGAAGAGCATGCGTGAGGCTCCGGTGCCCGTCAGTGGGCAGAGCGCACA | 1887 |
| Variant | TCGCCCACAGTCCCCGAGAAGTTGGGGGGAGGGGTCGGCAATTGAACCGGTGCC | |
| 15 | TAGAGAAGGTGGCGCGGGGTAAACTGGGAAAGTGATGTCGTGTACTGGCTCCGC | |
| | CTTTTTCCCGAGGGTGGGGGAGAACCGTATATAAGTGCAGTAGTCGCCGTGAAC | |
| | GTTCTTTTTCGCAACGGGTTTGCCGCCAGAACACAG | |
| Promoter | GTCATCACTGAGGTGGAGAAGAGCATGCGTGAGGCTCCGGTGCCCGTCAGTGGG | 1888 |
| Variant | CAGAGCGCACATCGCCCACAGTCCCCGAGAAGTTGGGGGGAGGGGTCGGCAATT | |
| 16 | GAACCGGTGCCTAGAGAAGGTGGCGCGGGGTAAACTGGGAAAGTGATGTCGTGT | |
| | ACTGGCTCCGCCTTTTTCCCGAGGGTGGGGGAGAACCGTATATAAGTGCAGTAG | |
| | TCGCCGTGAACGTTCTTTTTCGCAACGGGTTTGCCGCCAGAACACGCGTAAG | |
| Promoter | GTCATCACTGAGGTGGAGAAGAGCATGCGTGAGGCTCCGGTGCCCGTCAGTGGG | 1889 |
| Variant | CAGAGCGCACATCGCCCACAGTCCCCGAGAAGTTGGGGGGAGGGGTCGGCAATT | |
| 18 | GAACCGGTGCCTAGAGAAGGTGGCGCGGGGTAAACTGGGAAAGTGATGTCGTGT | |
| | ACTGGCTCCGCCTTTTTCCCGAGGGTGGGGGAGAACCGTATATAAGTGCAGTAG | |
| | TCGCCGTGAACGTTCTTTTTCGCAACGGGTTTGCCGCCAGAACACAG | |

[0791] In some embodiments, the promoter is a ubiquitous promoter as described in Yu et al. (Molecular Pain 2011, 7:63), Soderblom et al. (E. Neuro 2015), Gill et al., (Gene Therapy 2001, Vol. 8, 1539-1546), and Husain et al. (Gene Therapy 2009), each of which are incorporated by reference in their entirety.

[0792] In some embodiments, the promoter is not cell specific.

[0793] In some embodiments, the promoter is a ubiquitin c (UBC) promoter. The UBC promoter may have a size of 300-350 nucleotides. As a non-limiting example, the UBC promoter is 332 nucleotides. In some embodiments, the promoter is a β-glucuronidase (GUSB) promoter. The GUSB promoter may have a size of 350-400 nucleotides. As a non-limiting example, the GUSB promoter is 378 nucleotides. In some embodiments, the promoter is a neurofilament light (NFL) promoter. The NFL promoter may have a size of 600-700 nucleotides. As a non-limiting example, the NFL promoter is 650 nucleotides. In some embodiments, the promoter is a neurofilament heavy (NFH) promoter. The NFH promoter may have a size of 900-950 nucleotides. As a non-limiting example, the NFH promoter is 920 nucleotides. In some embodiments, the promoter is a scn8a promoter. The scn8a promoter may have a size of 450-500 nucleotides. As a non-limiting example, the scn8a promoter is 470 nucleotides.

[0794] In some embodiments, the promoter is a phosphoglycerate kinase 1 (PGK) promoter.

[0795] In some embodiments, the promoter is a chicken β-actin (CBA) promoter, or a functional variant thereof.

[0796] In some embodiments, the promoter is a CB6 promoter, or a functional variant thereof.

[0797] In some embodiments, the promoter is a CB promoter, or a functional variant thereof. In some embodiments, the promoter is a minimal CB promoter, or a functional variant thereof.

[0798] In some embodiments, the promoter is a CBA promoter, or functional variant thereof. In some embodiments, the promoter is a minimal CBA promoter, or functional variant thereof.

[0799] In some embodiments, the promoter is a cytomegalovirus (CMV) promoter, or a functional variant thereof.

[0800] In some embodiments, the promoter is a CAG promoter, or a functional variant thereof.

[0801] In some embodiments, the promoter is an EF1α promoter or functional variant thereof.

[0802] In some embodiments, the promoter is a GFAP promoter (as described, for example, in Zhang, Min, et al. Journal of neuroscience research 86.13 (2008): 2848-2856, the disclosure of which is incorporated by reference in its entirety) to drive expression of a GCase polypeptide, or a GCase polypeptide and an enhancement element (e.g., GCase and SapA, or GCase and SapC protein expression) in astrocytes.

[0803] In some embodiments, the promoter is a synapsin promoter, or a functional variant thereof.

[0804] In some embodiments, the promoter is an RNA pol III promoter. As a non-limiting example, the RNA pol III promoter is U6. As a non-limiting example, the RNA pol III promoter is H1.

[0805] In some embodiments, the viral genome comprises two promoters. As a non-limiting example, the promoters are an EFla promoter and a CMV promoter.

[0806] In some embodiments, the viral genome comprises an enhancer element, a promoter and/or a 5′UTR intron. The enhancer element, also referred to herein as an “enhancer,” may be, but is not limited to, a CMV enhancer, the promoter may be, but is not limited to, a CMV, CBA, UBC, GUSB, NSE, Synapsin, MeCP2, and GFAP promoter and the 5′UTR/intron may be, but is not limited to, SV40, and CBA-MVM. As a non-limiting example, the enhancer, promoter and/or intron used in combination may be: (1) CMV enhancer, CMV promoter, SV40 5′UTR intron; (2) CMV enhancer, CBA promoter, SV 40 5′UTR intron; (3) CMV enhancer, CBA promoter, CBA-MVM 5′UTR intron; (4) UBC promoter; (5) GUSB promoter, (6) NSE promoter; (7) Synapsin promoter, (8) MCCP2 promoter; and (9) GFAP promoter.

[0807] In some embodiments, the viral genome comprises an enhancer. In some embodiments, the enhancer comprises a CMVie enhancer.

[0808] In some embodiments the viral genome comprises a CMVie enhancer and a CB promoter. In some embodiments, the viral genome comprises a CMVie enhancer and a CMV promoter (e.g., a CMV promoter region). In some embodiments, the viral genome comprises a CMVie enhancer, a CBA promoter or functional variant thereof, and an intron (e.g., a CAG promoter).

[0809] In some embodiments, the viral genome comprises an engineered promoter. In another embodiments, the viral genome comprises a promoter from a naturally expressed protein.

[0810] In some embodiments, a CBA promoter is used in a viral genomes of an AAV particle described herein, e.g., a viral genome encoding a GCase protein, or a GCase protein and an enhancement element (e.g., a GCase and SapA proteins, GCase and SapC proteins, or GCase protein and a cell penetrating peptide or variants thereof). In some embodiments, the CBA promoter is engineered for optimal expression of a GCase polypeptide or a GCase polypeptide and an enhancement element described herein (e.g., a prosaposin or saposin protein or variant thereof; a cell penetrating peptide or variant thereof; or a lysosomal targeting signal).

### Viral Genome Component: Inrons

[0811] In some embodiments, the vector genome comprises at least one intron or a fragment or derivative thereof. In some embodiments, the at least one intron may enhance expression of a GCase protein and/or an enhancement element described herein (e.g., a prosaposin protein or a SapC protein or variant thereof; a cell penetrating peptide (e.g., a ApoEII peptide, a TAT peptide, or a ApoB peptide) or variant thereof; and/or a lysosomal targeting signal) (see e.g., Powell et al. Viral Expression Cassette Elements to Enhance Transgene Target Specificity and Expression in Gene Therapy, 2015; the contents of which are herein incorporated by reference in their entirety). Non-limiting examples of introns include, MVM (67-97 bps), F.IX truncated intron 1 (300 bps), β-globin SD/immunoglobulin heavy chain splice acceptor (250 bps), adenovirus splice donor/immunoglobin splice acceptor (500 bps), SV40 late splice donor/splice acceptor (19S/16S) (180 bps), and hybrid adenovirus splice donor/IgG splice acceptor (230 bps).

[0812] In some embodiments, the AAV vector may comprise an SV40 intron or fragment or variant thereof. In some embodiments, the promoter may be a CMV promoter. In some embodiments, the promoter may be CBA. In some embodiments, the promoter may be H1.

[0813] In some embodiments, the AAV vector may comprise a beta-globin intron or a fragment or variant thereof. In some embodiments, the intron comprises one or more human beta-globin sequences (e.g., including fragments/variants thereof). In some embodiments the promoter may be a CB promoter. In some embodiments, the promoter comprises a CMV promoter. In some embodiments, the promoter comprises a minimal CBA promoter.

[0814] In some embodiments, the encoded protein(s) may be located downstream of an intron in an expression vector such as, but not limited to, SV40 intron or beta globin intron or others known in the art. Further, the encoded GBA protein may also be located upstream of the polyadenylation sequence in an expression vector.

[0815] In certain embodiments, the intron sequence is not an enhancer sequence. In some embodiments, the intron sequence is not a sub-component of a promoter sequence. In some embodiments, the intron sequence is a sub-component of a promoter sequence.

### Vial Genome Component: Untranslated Regions (UTRs)

[0816] In some embodiments, a wild type untranslated region (UTR) of a gene is transcribed but not translated. Generally, the 5′ UTR starts at the transcription start site and ends at the start codon and the 3′ UTR starts immediately following the stop codon and continues until the termination signal for transcription.

[0817] Features typically found in abundantly expressed genes of specific target organs may be engineered into UTRs to enhance the stability and protein production. As a non-limiting example, a 5′ UTR from mRNA normally expressed in the liver (e.g., albumin, serum amyloid A, Apolipoprotein A/B/E, transferrin, alpha fetoprotein, erythropoietin, or Factor VIII) may be used in the viral genomes of the AAV particles of the disclosure to enhance expression in hepatic cell lines or liver.

[0818] In some embodiments, the viral genome encoding a transgene described herein (e.g., a transgene encoding a GBA protein) comprises a Kozak sequence. While not wishing to be bound by theory, wild-type 5′ untranslated regions (UTRs) include features that play roles in translation initiation. Kozak sequences, which are commonly known to be involved in the process by which the ribosome initiates translation of many genes, are usually included in 5′ UTRs. Kozak sequences have the consensus CCR(A/G)CCAUGG, where R is a purine (adenine or guanine) three bases upstream of the start codon (ATG), which is followed by another ‘G’.

[0819] In some embodiments, the 5′UTR in the viral genome includes a Kozak sequence.

[0820] In some embodiments, the 5′UTR in the viral genome does not include a Kozak sequence.

[0821] While not wishing to be bound by theory, wild-type 3′ UTRs are known to have stretches of adenosines and uridines embedded therein. These AU rich signatures are particularly prevalent in genes with high rates of turnover. Based on their sequence features and functional properties, the AU rich elements (AREs) can be separated into three classes (Chen et al, 1995, the contents of which are herein incorporated by reference in their entirety): Class I AREs, such as, but not limited to, c-Myc and MyoD, contain several dispersed copies of an AUUUA motif within U-rich regions. Class II AREs, such as, but not limited to, GM-CSF and TNF-α, possess two or more overlapping UUAUUUA(U/A)(U/A) nonamers. Class III ARES, such as, but not limited to, c-Jun and Myogenin, are less well defined. These U rich regions do not contain an AUUUA motif. Most proteins binding to the AREs are known to destabilize the messenger, whereas members of the ELAV family, most notably HuR, have been documented to increase the stability of mRNA. HuR binds to AREs of all the three classes. Engineering the HuR specific binding sites into the 3′ UTR of nucleic acid molecules will lead to HuR binding and thus, stabilization of the message in vivo.

[0822] Introduction, removal or modification of 3′ UTR AU rich elements (AREs) can be used to modulate the stability of polynucleotides. When engineering specific polynucleotides, e.g., payload regions of viral genomes, one or more copies of an ARE can be introduced to make polynucleotides less stable and thereby curtail translation and decrease production of the resultant protein. Likewise, AREs can be identified and removed or mutated to increase the intracellular stability and thus increase translation and production of the resultant protein.

[0823] In some embodiments, the 3′ UTR of the viral genome may include an oligo(dT) sequence for templated addition of a poly-A tail.

[0824] Any UTR from any gene known in the art may be incorporated into the viral genome of the AAV particle. These UTRs, or portions thereof, may be placed in the same orientation as in the gene from which they were selected or they may be altered in orientation or location. In some embodiments, the UTR used in the viral genome of the AAV particle may be inverted, shortened, lengthened, or made with one or more other 5′ UTRs or 3′ UTRs known in the art. As used herein, the term “altered,” as it relates to a UTR, means that the UTR has been changed in some way in relation to a reference sequence. For example, a 3′ or 5′ UTR may be altered relative to a wild type or native UTR by the change in orientation or location as taught above or may be altered by the inclusion of additional nucleotides, deletion of nucleotides, swapping or transposition of nucleotides.

[0825] In some embodiments, the viral genome of the AAV particle comprises at least one artificial UTR, which is not a variant of a wild type UTR.

[0826] In some embodiments, the viral genome of the AAV particle comprises UTRs which have been selected from a family of transcripts whose proteins share a common function, structure, feature, or property.

### Viral Genome Component: miR Binding Site

[0827] Tissue- or cell-specific expression of the AAV viral particles of the invention can be enhanced by introducing tissue- or cell-specific regulatory sequences, e.g., promoters, enhancers, microRNA binding sites, e.g., a detargeting site. Without wishing to be bound by theory, it is believed that an encoded miR binding site can modulate, e.g., prevent, suppress, or otherwise inhibit, the expression of a gene of interest on the viral genome of the invention, based on the expression of the corresponding endogenous microRNA (miRNA) or a corresponding controlled exogenous miRNA in a tissue or cell, e.g., a non-targeting cell or tissue. In some embodiments, a miR binding site modulates, e.g., reduces, expression of the payload encoded by a viral genome of an AAV particle described herein in a cell or tissue where the corresponding mRNA is expressed. In some embodiments, the miR binding site modulates, e.g., reduces, expression of the encoded GBA protein in a cell or tissue of the DRG, liver, hematopoietic lineage, or a combination thereof.

[0828] In some embodiments, the viral genome of an AAV particle described herein comprises a nucleotide sequence encoding a microRNA binding site, e.g., a detargeting site. In some embodiments, the viral genome of an AAV particle described herein comprises a nucleotide sequence encoding a miR binding site, a microRNA binding site series (miR BSs), or a reverse complement thereof.

[0829] In some embodiments, the nucleotide sequence encoding the miR binding site series or the miR binding site is located in the 3′-UTR region of the viral genome (e.g., 3′ relative to the nucleic acid sequence encoding a payload), e.g., before the polyA sequence, 5′-UTR region of the viral genome (e.g., 5′ relative to the nucleic acid sequence encoding a payload), or both.

[0830] In some embodiments, the encoded miR binding site series comprise at least 1-5 copies, e.g., at least 1-3, 2-4, 3-5, 1, 2, 3, 4, 5 or more copies of a miR binding site (miR BS). In some embodiments, the encoded miR binding site series comprises 4 copies of a miR binding site. In some embodiments, all copies are identical, e.g., comprise the same miR binding site. In some embodiments, the miR binding sites within the encoded miR binding site series are continuous and not separated by a spacer. In some embodiments, the miR binding sites within an encoded miR binding site series are separated by a spacer, e.g., a non-coding sequence. In some embodiments, the spacer is about 1 to 6 nucleotides or about 5 to 10 nucleotides, e.g., about 7-8 nucleotides, nucleotides in length. In some embodiments, the spacer is about 8 nucleotides in length. In some embodiments, the spacer sequence comprises one or more of (i) GGAT; (ii) CACGTG; (iii) GCATGC, or a repeat of one or more of (i)-(iii). In some embodiments, the spacer comprises the nucleotide sequence of GATAGTTA, or a nucleotide sequence having at least one, two, or three modifications, but no more than four modifications of GATAGTTA.

[0831] In some embodiments, the encoded miR binding site series comprise at least 1-5 copies, e.g., at least 1-3, 2-4, 3-5, 1, 2, 3, 4, 5 or more copies of a miR binding site (miR BS). In some embodiments, at least 1, 2, 3, 4, 5, or all of the copies are different, e.g., comprise a different miR binding site. In some embodiments, the miR binding sites within the encoded miR binding site series are continuous and not separated by a spacer. In some embodiments, the miR binding sites within an encoded miR binding site series are separated by a spacer, e.g., a non-coding sequence. In some embodiments, the spacer is about 1 to 6 nucleotides or about 5 to 10 nucleotides, e.g., about 7-8 nucleotides or about 8 nucleotides, in length. In some embodiments, the spacer sequence comprises one or more of (i) GGAT; (ii) CACGTG; (iii) GCATGC, or a repeat of one or more of (i)-(iii). In some embodiments, the spacer comprises the nucleotide sequence of GATAGTTA, or a nucleotide sequence having at least one, two, or three modifications, but no more than four modifications of GATAGTTA.

[0832] In some embodiments, the encoded miR binding site is substantially identical (e.g., at least 70%, 75%, 80%, 85%, 90%, 95%, 99% or 100% identical), to the miR in the host cell. In some embodiments, the encoded miR binding site comprises at least 1, 2, 3, 4, or 5 mismatches or no more than 6, 7, 8, 9, or 10 mismatches to a miR in the host cell. In some embodiments, the mismatched nucleotides are contiguous. In some embodiments, the mismatched nucleotides are non-contiguous. In some embodiments, the mismatched nucleotides occur outside the seed region-binding sequence of the miR binding site, such as at one or both ends of the miR binding site. In some embodiments, the encoded miR binding site is 100% identical to the miR in the host cell.

[0833] In some embodiments, the nucleotide sequence encoding the miR binding site is substantially complimentary (e.g., at least 70%, 75%, 80%, 85%, 90%, 95%, 99% or 100% complementary), to the miR in the host cell. In some embodiments, the sequence complementary to the nucleotide sequence encoding the miR binding site comprises at least 1, 2, 3, 4, or 5 mismatches or no more than 6, 7, 8, 9, or 10 mismatches relative to the corresponding miR in the host cell. In some embodiments, the mismatched nucleotides are contiguous. In some embodiments, the mismatched nucleotides are non-contiguous. In some embodiments, the mismatched nucleotides occur outside the seed region-binding sequence of the miR binding site, such as at one or both ends of the miR binding site. In some embodiments, the encoded miR binding site is 100% complementary to the miR in the host cell.

[0834] In some embodiments, the encoded miR binding site or the encoded miR binding site series is about 10 to about 125 nucleotides in length, e.g., about 10 to 50 nucleotides, 10 to 100 nucleotides, 50 to 100 nucleotides, 50 to 125 nucleotides, or 100 to 125 nucleotides in length. In some embodiments, an encoded miR binding site or the encoded miR binding site series is about 7 to about 28 nucleotides in length, e.g., about 8-28 nucleotides, 7-28 nucleotides, 8-18 nucleotides, 12-28 nucleotides, 20-26 nucleotides, 22 nucleotides, 24 nucleotides, or 26 nucleotides in length, and optionally comprises at least one consecutive region (e.g., 7 or 8 nucleotides) complementary (e.g., full complementary or partially complementary) to the seed sequence of a miRNA (e.g., a miR122, a miR142, a miR-1, a miR183).

[0835] In some embodiments, the encoded miR binding site is complementary (e.g., fully complementary or partially complementary) to a miR expressed in liver or hepatocytes, such as miR122. In some embodiments, the encoded miR binding site or encoded miR binding site series comprises a miR122 binding site sequence. In some embodiments, the encoded miR122 binding site comprises the nucleotide sequence of ACAAACACCATTGTCACACTCCA (SEQ ID NO: 1865), or a nucleotide sequence having at least 50%, 55%, 60%, 65%, 70%, 75%, 80%, 85%, 90%, at least 95%, at least 99%, or 100% sequence identity, or having at least one, two, three, four, five, six, or seven modifications but no more than ten modifications to SEQ ID NO: 1865, e.g., wherein the modification can result in a mismatch between the encoded miR binding site and the corresponding miRNA. In some embodiments, the viral genome comprises at least 3, 4, or 5 copies of the encoded miR122 binding site, e.g., an encoded miR122 binding site series, optionally wherein the encoded miR122 binding site series comprises the nucleotide sequence of: ACAAACACCATTGTCACACTCCACACAAACACCATTGTCACACTCCACACAAACACCATTGTCACACTCC A (SEQ ID NO: 1866), or a nucleotide sequence having at least 50%, 55%, 60%, 65%, 70%, 75%, 80%, 85%, 90%, at least 95%, at least 99%, or 100% sequence identity, or having at least one, two, three, four, five, six, or seven modifications but no more than ten modifications to SEQ ID NO: 1866, e.g., wherein the modification can result in a mismatch between the encoded miR binding site and the corresponding miRNA. In some embodiments, at least two of the encoded miR122 binding sites are connected directly, e.g., without a spacer. In other embodiments, at least two of the encoded miR122 binding sites are separated by a spacer, e.g., 1, 2, 3, 4, 5, 6, 7, 8, 9, or 10 nucleotides in length, which is located between two or more consecutive encoded miR122 binding site sequences. In embodiments, the spacer is about 1 to 6 nucleotides or about 5 to 10 nucleotides, e.g., about 7-8 nucleotides or about 8 nucleotides, in length. In some embodiments, the spacer sequence comprises one or more of (i) GGAT; (ii) CACGTG; (iii) GCATGC, or a repeat of one or more of (i)-(iii). In some embodiments, the spacer comprises the nucleotide sequence of GATAGTTA, or a nucleotide sequence having at least one, two, or three modifications, but no more than four modifications of GATAGTTA.

[0836] In some embodiments, the encoded miR binding site is complementary (e.g., fully or partially complementary) to a miR expressed in the heart. In embodiments, the encoded miR binding site or encoded miR binding site series comprises a miR-1 binding site. In some embodiments, the encoded miR-1 binding site comprises the nucleotide sequence of ATACATACTTCTTTACATTCCA (SEQ ID NO: 4679), a nucleotide sequence having at least 50%, 55%, 60%, 65%, 70%, 75%, 80%, 85%, 90%, at least 95%, at least 99%, or 100% sequence identity, or having at least one, two, three, four, five, six, or seven modifications but no more than ten modifications to SEQ ID NO: 4679, e.g., wherein the modification can result in a mismatch between the encoded miR binding site and the corresponding miRNA. In some embodiments, the viral genome comprises at least 2, 3, 4, or 5 copies of the encoded miR-1 binding site, e.g., an encoded miR-1 binding site series. In some embodiments, the at least 2, 3, 4, or 5 copies (e.g., 2 or 3 copies) of the encoded miR-1 binding site are continuous (e.g., not separated by a spacer) or separated by a spacer. In some embodiments, the spacer is about 1 to 6 nucleotides or about 5 to 10 nucleotides, e.g., about 7-8 nucleotides or about 8 nucleotides, in length. In some embodiments, the spacer sequence comprises one or more of (i) GGAT; (ii) CACGTG; (iii) GCATGC, or a repeat of one or more of (i)-(iii). In some embodiments, the spacer comprises the nucleotide sequence of GATAGTTA (SEQ ID NO: 1846), or a nucleotide sequence having at least one, two, or three modifications, but no more than four modifications of GATAGTTA (SEQ ID NO: 1846).

[0837] In some embodiments, the encoded miR binding site is complementary (e.g., fully complementary or partially complementary) to a miR expressed in hematopoietic lineage, including immune cells (e.g., antigen presenting cells or APC, including dendritic cells (DCs), macrophages, and B-lymphocytes). In some embodiments, the encoded miR binding site is complementary (e.g., fully complementary or partially complementary) to a miR expressed in hematopoietic lineage comprises a nucleotide sequence disclosed, e.g., in US 2018/0066279, the contents of which are incorporated by reference herein in its entirety.

[0838] In some embodiments, the encoded miR binding site or encoded miR binding site series comprises a miR-142-3p binding site sequence. In some embodiments, the encoded miR-142-3p binding site comprises the nucleotide sequence of TCCATAAAGTAGGAAACACTACA (SEQ ID NO: 1869), a nucleotide sequence having at least 50%, 55%, 60%, 65%, 70%, 75%, 80%, 85%, 90%, at least 95%, at least 99%, or 100% sequence identity, or having at least one, two, three, four, five, six, or seven modifications but no more than ten modifications to SEQ ID NO: 1842, e.g., wherein the modification can result in a mismatch between the encoded miR binding site and the corresponding miRNA. In some embodiments, the viral genome comprises at least 3, 4, or 5 copies of an encoded miR-142-3p binding site, e.g., an encoded miR-142-3p binding site series. In some embodiments, the at least 3, 4, or 5 copies (e.g., 4 copies) of the encoded miR-142-3p binding site are continuous (e.g., not separated by a spacer) or separated by a spacer. In some embodiments, the spacer is about 1 to 6 nucleotides or about 5 to 10 nucleotides, e.g., about 7-8 nucleotides or about 8 nucleotides, in length. In some embodiments, the spacer sequence comprises one or more of (i) GGAT; (ii) CACGTG; (iii) GCATGC, or a repeat of one or more of (i)-(iii). In some embodiments, the spacer comprises the nucleotide sequence of GATAGTTA, or a nucleotide sequence having at least one, two, or three modifications, but no more than four modifications of GATAGTTA.

[0839] In some embodiments, the encoded miR binding site is complementary (e.g., fully complementary or partially complementary) to a miR expressed in a DRG (dorsal root ganglion) neuron, e.g., a miR183, a miR182, and/or miR96 binding site. In some embodiments, the encoded miR binding site is complementary (e.g., fully complementary or partially complementary) to a miR expressed in expressed in a DRG neuron. In some embodiments, the encoded miR binding site comprises a nucleotide sequence disclosed, e.g., in WO2020/132455, the contents of which are incorporated by reference herein in its entirety.

[0840] In some embodiments, the encoded miR binding site or encoded miR binding site series comprises a miR183 binding site sequence. In some embodiments, the encoded miR183 binding site comprises the nucleotide sequence of AGTGAATTCTACCAgGCCAA (SEQ ID NO: 1847), or a nucleotide sequence having at least 50%, 55%, 60%, 65%, 70%, 75%, 80%, 85%, 90%, at least 95%, at least 99%, or 100% sequence identity, or having at least one, two, three, four, five, six, or seven modifications but no more than ten modifications to SEQ ID NO: 1847, e.g., wherein the modification can result in a mismatch between the encoded miR binding site and the corresponding miRNA. In some embodiments, the sequence complementary (e.g., fully complementary or partially complementary) to the seed sequence corresponds to the double underlined of the encoded miR-183 binding site sequence. In some embodiments, the viral genome comprises at least comprises at least 3, 4, or 5 copies (e.g., 4 copies) of the encoded miR183 binding site, e.g. an encoded miR183 binding site. In some embodiments, the viral genome comprises at least comprises 4 copies of the encoded miR183 binding site, e.g. an encoded miR183 binding site comprising 4 copies of a miR183 binding site. In some embodiments, the at least 3, 4, or 5 copies (e.g., 4 copies) of the encoded miR183 binding site are continuous (e.g., not separated by a spacer) or separated by a spacer. In some embodiments, the spacer is about 1 to 6 nucleotides or about 5 to 10 nucleotides, e.g., about 7-8 nucleotides or about 8 nucleotides, in length. In some embodiments, the spacer comprises the nucleotide sequence of GATAGTTA, or a nucleotide sequence having at least one, two, or three modifications, but no more than four modifications of GATAGTTA. In some embodiments, the encoded miR183 binding site series comprises the nucleotide sequence of SEQ ID NO: 1849, or a nucleotide sequence having at least 50%, 55%, 60%, 65%, 70%, 75%, 80%, 85%, 90%, at least 95%, at least 99%, or 100% sequence identity, or having at least one, two, three, four, five, six, or seven modifications but no more than ten modifications to SEQ ID NO: 1849.

[0841] In some embodiments, the encoded miR binding site or encoded miR binding site series comprises a miR182 binding site sequence. In some embodiments, the encoded miR182 binding site comprises, the nucleotide sequence of AGTGTGAGTTCTACCATTGCCAAA (SEQ ID NO: 1867), a nucleotide sequence having at least 50%, 55%, 60%, 65%, 70%, 75%, 80%, 85%, 90%, at least 95%, at least 99%, or 100% sequence identity, or having at least one, two, three, four, five, six, or seven modifications but no more than ten modifications to SEQ ID NO: 1867, e.g., wherein the modification can result in a mismatch between the encoded miR binding site and the corresponding miRNA. In some embodiments, the viral genome comprises at least 3, 4, or 5 copies of the encoded miR182 binding site, e.g., an encoded miR182 binding site series. In some embodiments, the at least 3, 4, or 5 copies (e.g., 4 copies) of the encoded miR182 binding site are continuous (e.g., not separated by a spacer) or separated by a spacer. In some embodiments, the spacer is about 1 to 6 nucleotides or about 5 to 10 nucleotides, e.g., about 7-8 nucleotides or about 8 nucleotides, in length. In some embodiments, the spacer comprises the nucleotide sequence of GATAGTTA, or a nucleotide sequence having at least one, two, or three modifications, but no more than four modifications of GATAGTTA.

[0842] In some embodiments, the encoded miR binding site or encoded miR binding site series comprises a miR96 binding site sequence. In some embodiments, the encoded miR96 binding site comprises the nucleotide sequence of AGCAAAAATGTGCTAGTGCCAAA (SEQ ID NO: 1868), a sequence having at least 50%, 55%, 60%, 65%, 70%, 75%, 80%, 85%, 90%, at least 95%, at least 99%, or 100% sequence identity, or having at least one, two, three, four, five, six, or seven modifications but no more than ten modifications to SEQ ID NO: 1868, e.g., wherein the modification can result in a mismatch between the encoded miR binding site and the corresponding miRNA. In some embodiments, the viral genome comprises at least 3, 4, or 5 copies of the encoded miR96 binding site, e.g., an encoded miR96 binding site series. In some embodiments, the at least 3, 4, or 5 copies (e.g., 4 copies) of the encoded miR96 binding site are continuous (e.g., not separated by a spacer) or separated by a spacer. In some embodiments, the spacer is about 1 to 6 nucleotides or about 5 to 10 nucleotides, e.g., about 7-8 nucleotides or about 8 nucleotides, in length. In some embodiments, the spacer comprises the nucleotide sequence of GATAGTTA, or a nucleotide sequence having at least one, two, or three modifications, but no more than four modifications of GATAGiTA.

[0843] In some embodiments, the encoded miR binding site series comprises a miR122 binding site, a miR142 binding site, a miR183 binding site, a miR182 binding site, a miR 96 binding site, or a combination thereof. In some embodiments, the encoded miR binding site series comprises at least 3, 4, or 5 copies of a miR122 binding site, a miR-1, a miR142 binding site, a miR183 binding site, a miR182 binding site, a miR % binding site, or a combination thereof. In some embodiments, at least two of the encoded miR binding sites are connected directly, e.g., without a spacer. In other embodiments, at least two of the encoded miR binding sites are separated by a spacer, e.g., 1, 2, 3, 4, 5, 6, 7, 8, 9, or 10 nucleotides in length, which is located between two or more consecutive encoded miR binding site sequences. In embodiments, the spacer is at least about 5 to 10 nucleotides, e.g., about 7-8 nucleotides or about 8 nucleotides, in length. In some embodiments, the spacer sequence comprises one or more of (i) GGAT; (ii) CACGTG; (iii) GCATGC, or a repeat of one or more of (i)-(iii). In some embodiments, the spacer comprises the nucleotide sequence of GATAGTTA, or a nucleotide sequence having at least one, two, or three modifications, but no more than four modifications of GATAGTTA.

[0844] In some embodiments, an encoded miR binding site series comprises at least 3-5 copies (e.g., 4 copies) of a combination of at least two, three, four, five, or all of a miR122 binding site, a miR-1 a miR142 binding site, a miR183 binding site, a miR182 binding site, a miR96 binding site, wherein each of the miR binding sites within the series are continuous (e.g., not separated by a spacer) or separated by a spacer. In some embodiments, the spacer is about 1 to 6 nucleotides or about 5 to 10 nucleotides, e.g., about 7-8 nucleotides or about 8 nucleotides, in length. In some embodiments, the spacer sequence comprises one or more of (i) GGAT; (ii) CACGTG; (iii) GCATGC, or a repeat of one or more of (i)-(iii). In some embodiments, the spacer comprises the nucleotide sequence of GATAGiTA, or a nucleotide sequence having at least one, two, or three modifications, but no more than four modifications of GATAGTTA.

### Vial Genome Component: Polyadenyladon Sequence

[0845] In some embodiments, the viral genome of the AAV particles of the present disclosure comprises at least one polyadenylation (polyA) sequence. The viral genome of the AAV particle may comprise a polyadenylation sequence between the 3′ end of the payload coding sequence and the 5′ end of the 3′UTR. In some embodiments, the polyA signal region is positioned 3′ relative to the nucleic acid comprising the transgene encoding the payload, e.g., a GBA protein described herein.

[0846] In some embodiments, the viral genome comprises a human growth hormone (hGH) polyA sequence. In some embodiments, the viral genome comprises an hGH polyA as described above and a payload region encoding the GCase protein, or the GCase and an enhancement element (e.g., a prosaposin, SapA, or SapC protein, or variant thereof; a cell penetrating peptide (e.g., an ApoEII peptide, a TAT peptide, or an ApoB peptide); or a lysosomal targeting peptide) e.g., encoding a sequence as provided in Tables 3 and 4 or fragment or variant thereof.

### Vial Genome Component: Payloads

[0847] In some embodiments, an AAV particle, e.g., an AAV particle for the vectorized delivery of a GBA protein, e.g., a GBA protein described herein, comprises a payload. In some embodiments, an AAV particle, e.g., an AAV particle for the vectorized delivery of a GBA protein described herein (e.g., an GBA protein), comprises a viral genome encoding a payload. In some embodiments, the viral genome comprises a promoter operably linked to a nucleic acid comprising a transgene encoding a payload. In some embodiments, the payload comprises an GBA protein.

[0848] In some embodiments, the disclosure herein provides constructs that allow for improved expression of GCase protein delivered by gene therapy vectors.

[0849] In some embodiments, the disclosure provides constructs that allow for improved biodistribution of GCase protein delivered by gene therapy vectors.

[0850] In some embodiments, the disclosure provides constructs that allow for improved sub-cellular distribution or trafficking of GCase protein delivered by gene therapy vectors.

[0851] In some embodiments, the disclosure provides constructs that allow for improved trafficking of GCase protein to lysosomal membranes delivered by gene therapy vectors.

[0852] In some aspects, the present disclosure relates to a composition containing or comprising a nucleic acid sequence encoding a GCase protein or functional fragment or variants thereof and methods of administering the composition in vitro or in vivo in a subject, e.g., a humans and/or an animal model of disease, e.g., a disease related to expression of GBA.

[0853] AAV particles of the present disclosure may comprise a nucleic acid sequence encoding at least one “payload.” As used herein, “payload” or “payload region” refers to one or more polynucleotides or polynucleotide regions encoded by or within a viral genome or an expression product of such polynucleotide or polynucleotide region, e.g., a transgene, a polynucleotide encoding a polypeptide or multi-polypeptide, e.g., GCase protein or fragment or variant thereof. The payload may comprise any nucleic acid known in the art that is useful for the expression (by supplementation of the protein product or gene replacement using a modulatory nucleic acid) of GCase protein in a target cell transduced or contacted with the AAV particle carrying the payload.

[0854] Specific features of a transgene encoding GCase for use in an AAV genome as described herein include the use of a wildtype GBA-encoding sequence and enhanced GBA-encoding constructs. In some instances, the GBA-encoding sequence is a recombinant and/or modified GBA sequence as described in Int'l Pub. No. WO2019040507, the contents of which are herein incorporated by reference in their entirety. In some embodiments, the GBA-encoding sequence is as provided by NCBI Reference Sequence NCBI Reference Sequence NP_000148.2 (SEQ ID NO: 14 of Int'l Pub. No. WO2019070893, incorporated by reference herein). In some embodiments, the GBA-encoding sequence is codon optimized for expression in mammalian cells including human cells, such as the sequence set forth in SEQ ID NO: 15 of WO2019070893. In some embodiments, the viral genome comprises a sequence encoding Prosaposin (PSAP), the precursor of Saposin proteins A, B, C, and D (SapA, SapB, SapC, and SapD, respectively). The sequence encoding Prosaposin can be the sequence as provided by NCBI Reference Sequence NP_002769.1 (SEQ ID NO: 16 of WO2019070893). In some embodiments, the PSAP-encoding sequence is codon optimized for expression in mammalian cells including human cells, such as the sequence set forth in SEQ ID NO: 17 of WO2019070893. In some embodiments, the GBA-encoding sequence is a recombinant and/or modified GBA sequence as described in Int'l Pub. No. WO2019070894.

[0855] An enhanced GBA-encoding sequence, as described and exemplified herein, can achieve enhanced catalytic activity of the GCase enzyme by incorporation of prosaposin or saposin C coding sequence in the viral genome. Alternatively, an enhanced GBA-encoding sequence can achieve enhanced cell penetration of secreted GCase product by incorporating, e.g., HIV-derived TAT peptide, Human Apolipoprotein B receptor binding domain, Human Apolipoprotein E II receptor binding domain, or other cell penetration-enhancing sequences. In some embodiments, the enhanced GBA-encoding sequence can achieve enhanced intracellular lysosomal targeting by incorporating one or more of, a) an Rnase A-derived sequence; b) an HSC70-derived sequence; c) a Hemoglobin-derived sequence; d) a combination of Rnase A-, HSC70-, and Hemoglobin-derived lysosomal targeting sequences; or e) other lysosomal targeting enhancer sequences. An enhanced GBA-encoding sequences as described herein can, in some embodiments, incorporate combinatorial enhancements of the enhanced catalytic activity, enhanced cell-penetration activity, and/or enhanced lysosomal targeting features. In some embodiments, the combination(s) of these enhanced features have additive effects on GCase activity or expression in cells infected with AAV particles bearing the AAV genomes described herein. For example, in some embodiments, the AAV genome described herein comprise a GCase-encoding nucleic acid sequence having a lysosomal targeting sequence, GCase-coding sequence, linker, and PSAP/SapC-encoding sequence. In some embodiments, the combination(s) of these enhanced features have synergistic effects on GCase activity or expression in cells infected with AAV particles bearing the AAV genomes described herein.

[0856] The payload construct may comprise a combination of coding and non-coding nucleic acid sequences.

[0857] Any segment, fragment, or the entirety of the viral genome and therein, the payload region, may be codon optimized.

[0858] In some embodiments, the viral genome encodes more than one payload. As a non-limiting example, a viral genome encoding more than one payload may be replicated and packaged into a viral particle. A target cell transduced with a viral particle comprising more than one payload may express each of the payloads in a single cell.

[0859] In some embodiments, the viral genome may encode a coding or non-coding RNA. In certain embodiments, the adeno-associated viral vector particle further comprises at least one cis-element selected from the group consisting of a Kozak sequence, a backbone sequence, and an intron sequence.

[0860] In some embodiments, the payload is a polypeptide which may be a peptide or protein. A protein encoded by the payload construct may comprise a secreted protein, an intracellular protein, an extracellular protein, and/or a membrane protein. The encoded proteins may be structural or functional. Proteins encoded by the viral genome include, but are not limited to, mammalian proteins. In certain embodiments, the AAV particle contains a viral genome that encodes GCase protein or a fragment or variant thereof. The AAV particles described herein may be useful in the fields of human disease, veterinary applications, and a variety of in vivo and in vitro settings.

[0861] In some embodiments, a payload may comprise polypeptides that serve as marker proteins to assess cell transformation and expression, fusion proteins, polypeptides having a desired biological activity, gene products that can complement a genetic defect, RNA molecules, transcription factors, and other gene products that are of interest in regulation and/or expression. In some embodiments, a payload may comprise nucleotide sequences that provide a desired effect or regulatory function (e.g., transposons, transcription factors).

[0862] The encoded payload may comprise a gene therapy product. A gene therapy product may include, but is not limited to, a polypeptide, RNA molecule, or other gene product that, when expressed in a target cell, provides a desired therapeutic effect. In some embodiments, a gene therapy product may comprise a substitute for a non-functional gene or a gene that is absent, expressed in insufficient amounts, or mutated. In some embodiments, a gene therapy product may comprise a substitute for a non-functional protein or polypeptide or a protein or polypeptide that is absent, expressed in insufficient amounts, misfolded, degraded too rapidly, or mutated. For example, a gene therapy product may comprise a GCase protein or a polynucleotide encoding GCase protein to treat GCase deficiency or GBA-related disorders.

[0863] In some embodiments, the payload encodes a messenger RNA (mRNA). As used herein, the term “messenger RNA” (mRNA) refers to any polynucleotide that encodes a polypeptide of interest and that is capable of being translated to produce the encoded polypeptide of interest in vitro, in vivo, in situ, or ex vivo. Certain embodiments provide the mRNA as encoding GCase or a variant thereof.

[0864] The components of an mRNA include, but are not limited to, a coding region, a 5′-UTR (untranslated region), a 3′-UTR, a 5′-cap and a poly-A tail. In some embodiments, the encoded mRNA or any portion of the AAV genome may be codon optimized.

[0865] A payload construct encoding a payload may comprise or encode a selectable marker. A selectable marker may comprise a gene sequence or a protein or polypeptide encoded by a gene sequence expressed in a host cell that allows for the identification, selection, and/or purification of the host cell from a population of cells that may or may not express the selectable marker. In some embodiments, the selectable marker provides resistance to survive a selection process that would otherwise kill the host cell, such as treatment with an antibiotic. In some embodiments, an antibiotic selectable marker may comprise one or more antibiotic resistance factors, including but not limited to neomycin resistance (e.g., neo), hygromycin resistance, kanamycin resistance, and/or puromycin resistance.

[0866] In some embodiments, a payload construct encoding a payload may comprise a selectable marker including, but not limited to, β-lactamase, luciferase, β-galactosidase, or any other reporter gene as that term is understood in the art, including cell-surface markers, such as CD4 or the truncated nerve growth factor (NGFR) (for GFP, see WO 96/23810; Heim et al., Current Biology 2:178-182 (1996); Heim et al., Proc. Natl. Acad. Sci. USA (1995); or Heim et al., Science 373:663-664 (1995); for β-lactamase, see WO 96/30540); the contents of each of which are herein incorporated by reference in their entirety.

[0867] In some embodiments, a payload construct encoding a selectable marker may comprise a fluorescent protein. A fluorescent protein as herein described may comprise any fluorescent marker including but not limited to green, yellow, and/or red fluorescent protein (GFP, YFP, and/or RFP). In some embodiments, a payload construct encoding a selectable marker may comprise a human influenza hemagglutinin (HA) tag.

[0868] In certain embodiments, a nucleic acid for expression of a payload in a target cell will be incorporated into the viral genome and located between two ITR sequences.

[0869] In some embodiments, a payload construct further comprises a nucleic acid sequence encoding a peptide that binds to the cation-independent mannose 6-phosphate (M6P) receptor (CI-MPR) with high affinity, as described in Int'l Pat. App. Pub. No. WO2019213180A1, the disclosure of which is incorporated herein by reference in its entirety. The peptide that binds CI-MPR can be, e.g., an IGF2 peptide or variant thereof. Binding of CI-MPR can facilitate cellular uptake or delivery and intracellular or sub-cellular targeting of therapeutic proteins provided by gene therapy vectors.

### Payload Component: Linker

[0870] In some embodiments, a viral genome described herein may be engineered with one or more spacer or linker regions to separate coding or non-coding regions.

[0871] In some embodiments, the nucleic acid comprising a transgene encoding the payload, e.g., a GBA protein described herein, further comprises a nucleic acid sequence encoding a linker. In some embodiments, the nucleic acid encoding the payload encodes two or more linkers. In some embodiments, the encoded linker comprises a linker provided in Table 2 or 5. In some embodiments, the encoded linker comprises an amino acid sequence encoded by any one of the nucleotide sequences provided in Table 2 or 5, or an amino acid sequence with at least 70%, 75%, 80%, 85%, 90%, 95%, or 99% sequence identity thereto. In some embodiments, the nucleic acid sequence encoding the linker comprises any one of the nucleotide sequences provided in Table 2 or 5, or a nucleotide sequence with at least 70%, 75%, 80%, 85%, 90%, 95%, or 99% sequence identity thereto. In some embodiments, the linker comprises any one of the amino acid sequences provided in Table 2, or an amino acid sequence

[0872] In some embodiments, the linker may be a peptide linker that may be used to connect the polypeptides encoded by the payload region during expression. In some embodiments, a peptide linkers may be cleaved after expression to separate GCase protein domains, or to separate GCase proteins from an enhancement element described herein, e.g., a prosaposin, SapA and/or SapC protein or functional variant, allowing expression of independent functional GCase protein and enhancement element polypeptide, e.g., a prosaposin, SapA, and/or SapC polypeptides, and other payload polypeptides. Linker cleavage may be enzymatic. In some cases, linkers comprise an enzymatic cleavage site to facilitate intracellular or extracellular cleavage. Some payload regions encode linkers that interrupt polypeptide synthesis during translation of the linker sequence from an mRNA transcript. Such linkers may facilitate the translation of separate protein domains from a single transcript. In some cases, two or more linkers are encoded by a payload region of the viral genome.

TABLE 2
Linkers

| Linker ID | Description | Length | SEQ ID NO |
|---|---|---|---|
| Linker1 | Furin | 12 | 1724 |
| Linker2 | Furin | 12 | 1725 |
| Linker3 | T2A | 54 | 1726 |
| Linker4 | F2A | 75 | 1727 |
| Linker5 | P2A | 66 | 1728 |
| Linker6 | G4S | 18 | 1729 |
| Linker7 | G4S3 | 45 | 1730 |
| Linker8 | G4S5 | 75 | 1731 |
| Linker9 | IRES | 609 | 1732 |
| Linker10 | IRES-2 | 623 | 1733 |
| Linker11 | hIgG2 hinge | 54 | 1734 |
| Linker12 | hIgG3 hinge | 108 | 1735 |
| Linker13 | hIgG3-2 hinge | 153 | 1736 |
| Linker14 | hIgG3-3 hinge | 198 | 1737 |
| Linker15 | msiGG-1 hinge | 45 | 1738 |
| Linker16 | msiGG1 hinge | 18 | 1739 |
| Linker17 | G4S3 | 45 | 1873 |

[0873] In some embodiments, the GBA protein and the enhancement element described herein can be connected directly, e.g., without a linker. In some embodiments, the GBA protein and the enhancement element described herein can be connected via a linker. In some embodiments, the linker is a cleavable linker. In some embodiments, the linker is not cleaved.

[0874] In some embodiments, any of the payloads described herein, can have a linker, e.g. a flexible polypeptide linker, of varying lengths, connecting the GBA protein and the enhancement element, e.g., the cell penetrating peptide, e.g., a ApoEII peptide, a TAT peptide, and/or a ApoB peptide. For example, a (Gly4Ser)n linker (SEQ ID NO: 1872), wherein n is 0, 1, 2, 3, 4, 5, 6, 7, or 8 can be used (e.g., any one of SEQ ID NOs: 1729, 1730, 1731, 1843, or 1845). In some embodiments, the linker comprises a (Gly4Ser)3 (SEQ ID NO: 1845). In some embodiments, the nucleotide sequence encoding the linker comprises the nucleotide sequence of SEQ ID NO: 1730, or a nucleotide sequence having at least one, two, or three but no more than four modifications, e.g., substitutions, relative to SEQ ID NO: 1730. In some embodiments, the encoded linker comprises the amino acid sequence of SEQ ID NO: 1845, or an amino acid sequence having at least one, two, or three but no more than four modifications, e.g., substitutions, relative to SEQ ID NO: 1845.

[0875] In some embodiments, the encoded linker comprises an enzymatic cleavage site, e.g., for intracellular and/or extracellular cleavage. In some embodiments, the linker is cleaved to separate the GBA protein and the encoded enhancement element, e.g., a prosaposin polypeptide, a SapA polypeptide, a SapC polypeptide, or functional variant thereof. In some embodiments, the encoded linker comprises a furin linker or a functional variant. In some embodiments, the nucleotide sequence encoding the furin linker comprises the nucleotide sequence of SEQ ID NO: 1724, a nucleotide sequence with at least 70%, 75%, 80%, 85%, 90%, 95%, or 99% sequence identity to SEQ ID NO: 1724, or a nucleotide sequence having at least one, two, or three but no more than four modifications, e.g., substitutions, relative to SEQ ID NO: 1724. In some embodiments, the furin linker comprises the amino acid sequence of SEQ ID NO: 1854, or an amino acid sequence having at least one, two, or three but no more than four modifications, e.g., substitutions, relative to SEQ ID NO: 1854. In some embodiments, furin cleaves proteins downstream of a basic amino acid target sequence (e.g., Arg-X-(Arg/Lys)-Arg) (e.g., as described in Thomas, G., 2002. Nature Reviews Molecular Cell Biology 3(10): 753-66; the contents of which are herein incorporated by reference in its entirety). In some embodiments, the encoded linker comprises a 2A self-cleaving peptide (e.g., a 2A peptide derived from foot-and-mouth disease virus (F2A), porcine teschovirus-1 (P2A), Thoseaasigna virus (T2A), or equine rhinitis A virus (E2A)). In some embodiments, the encoded linker comprises a T2A self-cleaving peptide linker. In some embodiments, the nucleotide sequence encoding the T2A linker comprises the nucleotide sequence of SEQ ID NO: 1726, a nucleotide sequence with at least 70%, 75%, 80%, 85%, 90%, 95%, or 99% sequence identity to SEQ ID NO: 1726, or a nucleotide sequence having at least one, two, or three but no more than four modifications, e.g., substitutions, relative to SEQ ID NO: 1726. In some embodiments, the T2A linker comprises the amino acid sequence of SEQ ID NO: 1855, or an amino acid sequence having at least one, two, or three but no more than four modifications, e.g., substitutions, relative to SEQ ID NO: 1855. In some embodiments, the nucleic acid encoding the payload encodes a furin linker and a T2A linker.

[0876] In some embodiments, the encoded linker comprises an internal ribosomal entry site (IRES) is a nucleotide sequence (>500 nucleotides) for initiation of translation in the middle of a nucleotide sequence, e.g., an mRNA sequence (Kim, J. H. et al., 2011. PLoS One 6(4): e18556; the contents of which are herein incorporated by reference in its entirety), which can be used, for example, to modulate expression of one or more transgenes. In some embodiments, the encode linker comprises a small and unbranched serine-rich peptide linker, such as those described by Huston et al. in U.S. Pat. No. 5,525,491, the contents of which are herein incorporated in their entirety. In some embodiments, polypeptides comprising a serine-rich linker has increased solubility. In some embodiments, the encoded linker comprises an artificial linker, such as those described by Whitlow and Filpula in U.S. Pat. No. 5,856,456 and Ladner et al. in U.S. Pat. No. 4,946,778, the contents of each of which are herein incorporated by their entirety.

[0877] In some embodiments, the encoded linkers comprises a cathepsin, a matrix metalloproteinases or a legumain cleavage sites, such as those described e.g. by Cizeau and Macdonald in International Publication No. WO2008052322, the contents of which are herein incorporated in their entirety.

### Payload Component: Signal Sequence

[0878] In some embodiments, the nucleic acid sequence comprising the transgene encoding the payload, e.g., a GBA protein, an enhancement element (e.g., a prosaposin protein, saposin C protein, or variant thereof; a cell penetrating peptide (e.g., a ApoEII peptide, a TAT peptide, and/or an ApoB protein), or a lysosomal targeting signal), or a GBA protein and an enhancement element, comprises a nucleic acid sequence encoding a signal sequence (e.g., a signal sequence region herein). In some embodiments, the nucleic acid sequence comprising the transgene encoding the payload comprises two signal sequence regions. In some embodiments, the nucleic acid sequence comprising the transgene encoding the payload comprises three or more signal sequence regions.

[0879] In some embodiments, the nucleotide sequence encoding the signal sequence is located 5′ relative to the nucleotide sequence encoding the GBA protein. In some embodiments, the nucleotide sequence encoding the signal sequence is located 5′ relative to the nucleotide sequence encoding the enhancement element. In some embodiments, the encoded GBA protein and/or the encoded enhancement element comprises a signal sequence at the N-terminus, wherein the signal sequence is optionally cleaved during cellular processing and/or localization of the GBA protein and/or the enhancement element.

[0880] In some embodiments, the signal sequence comprises the sequence any one of the signal sequences provided in Table 4 or 14 or a sequence substantially identical (e.g., having at least 70%, 75%, 80%, 85%, 90%, 95%, or 99% identity) thereto. In some embodiments, the the encoded signal sequence comprises the amino acid sequence of SEQ ID NO: 1853 or 1857, or an amino acid sequence at least 85% (e.g., at least 90%, 92%, 95%, 97%, 98%, or 99%) identical thereto. In some embodiments, the nucleotide sequence encoding the signal sequence comprises of any of SEQ ID NOs: 1850-1852 or 1856, or a nucleotide sequence at least 85% (e.g., at least 90%, 92%, 95%, 97%, 98%, or 99%) identical thereto.

[0881] In some embodiments, the encoded signal sequence comprises the amino acid sequence of SEQ ID NO: 1853 or an amino acid sequence at least 85% (e.g., at least 90%, 92%, 95%, 97%, 98%, or 99%) identical thereto; and the encoded GBA protein comprises the amino acid sequence of SEQ ID NO: 1775, or an amino acid sequence at least 70% (e.g., at least 75%, 80%, 85%, 90%, 92%, 95%, 97%, 98%, or 99%) identical thereto. In some embodiments, the encoded signal sequence is located N-terminal relative to the encoded GBA protein.

[0882] In some embodiments, the nucleotide sequence encoding the signal sequence comprises the nucleotide sequence of 1850 or a nucleotide sequence at least 85% (e.g., at least 90%, 92%, 95%, 97%, 98%, or 99%) identical thereto, and the nucleotide sequence encoding the GBA protein comprises the nucleotide sequence of SEQ ID NO: 1773, or a nucleotide sequence at least 70% (e.g., at least 75%, 80%, 85%, 90%, 92%, 95%, 97%, 98%, or 99%) identical thereto. In some embodiments, the nucleotide sequence encoding the signal sequence comprises the nucleotide sequence of 1851 or a nucleotide sequence at least 85% (e.g., at least 90%, 92%, 95%, 97%, 98%, or 99%) identical thereto, and the nucleotide sequence encoding the GBA protein comprises the nucleotide sequence of SEQ ID NO: 1777, or a nucleotide sequence at least 70% (e.g., at least 75%, 80%, 85%, 90%, 92%, 95%, 97%, 98%, or 99%) identical thereto. In some embodiments, the nucleotide sequence encoding the signal sequence comprises the nucleotide sequence of 1852 or a nucleotide sequence at least 85% (e.g., at least 90%, 92%, 95%, 97%, 98%, or 99%) identical thereto, and the nucleotide sequence encoding the GBA protein comprises the nucleotide sequence of SEQ ID NO: 1781, or a nucleotide sequence at least 70% (e.g., at least 75%, 80%, 85%, 90%, 92%, 95%, 97%, 98%, or 99%) identical thereto. In some embodiments, the nucleotide sequence encoding the signal sequence is located 5′ relative to the nucleotide sequence encoding the GBA protein.

### Exemplary GCase (GBA) Protein Payload

[0883] In some embodiments, the payload, e.g., of a viral genome described herein, is a GCase protein, e.g., a wild-type GCase protein, or a functional variant thereof. In some embodiments, a functional variant is a variant that retains some or all of the activity of its wild-type counterpart, so as to achieve a desired therapeutic effect. For example, in some embodiments, a functional variant is effective to be used in gene therapy to treat a disorder or condition, for example, a GBA gene product deficiency, PD, or a GBA-related disorders, a neurodegenerative disorder, and/or a neuromuscular disorder. Unless indicated otherwise, a variant of a GCase protein as described herein (e.g., in the context of the constructs, vectors, genomes, methods, kits, compositions, etc. of the disclosure) is a functional variant.

[0884] As used herein, “associated with decreased GCase protein levels” or “associated with decreased expression” means that one or more symptoms of a disease are caused by lower-than-normal GCase protein levels in a target tissue or in a biofluid such as blood. A disease or condition associated with decreased GCase protein levels or expression may be a disorder of the central nervous system. Also specifically contemplated herein are Parkinson Disease and related disorders arising from expression of defective GBA gene product, e.g., a PD associated with a GBA mutation. Such a disease or condition may be a neuromuscular or a neurological disorder or condition. For example, a disease associated with decreased GCase protein levels may be Parkinson Disease or related disorder, or may be another neurological or neuromuscular disorder described herein, e.g., a PD associated with a GBA mutation, Gaucher Disease (GD) (e.g., Type 1 GD, Type 2 GD, or Type 3 GD, dementia with Lewy Bodies (DLB), Gaucher disease (GD), Spinal muscular atrophy (SMA), Multiple System Atrophy (MSA), or Multiple sclerosis (MS).

[0885] The present disclosure addresses the need for new technologies by providing GCase protein related treatment deliverable by AAV-based compositions and complexes for the treatment of GBA-related disorders.

[0886] While delivery is exemplified in the AAV context, other viral vectors, non-viral vectors, nanoparticles, or liposomes may be similarly used to deliver the therapeutic GCase protein(s) and include, but are not limited to, vector genomes of any of the AAV serotypes or other viral delivery vehicles or lentivirus, etc. The observations and teachings extend to any macromolecular structure, including modified cells, introduced into the CNS in the manner as described herein.

[0887] Given in Table 3 are the sequence identifiers of exemplary polynucleotide and polypeptide sequences for GCase proteins that may be used in the viral genomes disclosed herein and which may constitute a GCase protein payload. Functional variants, e.g., those retaining at least about 90% or at least 95% sequence identity to a sequence shown in Table 3, may also be used. In some embodiments, a codon-optimized and other variants that encode the same or essentially the same GCase protein amino acid sequence (e.g., those having at least about 90% amino acid sequence identity) may also be used.

[0888] In some embodiments, the viral genome comprises a nucleic acid comprising a transgene encoding a GBA protein, or functional variant thereof. In some embodiments, the encoded GBA protein, or functional variant thereof comprises an amino acid sequence from a GBA protein described herein, e.g., as described in Table 3 or 15, or an amino acid sequence substantially identical (e.g., having at least about 70%, 75%, 80%, 85%, 90%, 92%, 95%, 97%, 98%, or 99% sequence identity) to any of the aforesaid sequences. In some embodiments, the encoded GBA protein or functional variant thereof comprises an amino acid sequence from an GBA protein described herein, e.g., as described in Table 3 or 15, or an amino acid sequence having at least one, two or three modifications but not more than 30, 20 or 10 modifications relative to any of the aforesaid amino acid sequences. In some embodiments, the encoded GBA protein or functional variant thereof, comprises an amino acid sequence encoded by a nucleotide sequence encoding a GBA protein described herein, e.g., as described in Table 3 or 15, or a nucleotide sequence substantially identical (e.g., having at least about 70%, 75%, 80%, 85%, 90%, 92%, 95%, 97%, 98%, or 99% sequence identity) to any of the aforesaid sequences.

[0889] In some embodiments, the nucleotide sequence encoding the GBA protein or functional variant thereof comprises a nucleotide sequence encoding a GBA protein described herein, e.g., as described in Table 3 or 15, or a nucleotide sequence substantially identical (e.g., having at least about 70%, 75%, 80%, 85%, 90%, 92%, 95%, 97%, 98%, or 99% sequence identity) to any of the aforesaid sequences. In some embodiments, the nucleotide sequence encoding the GBA protein or functional variant thereof comprises a nucleotide sequence encoding a GBA protein described herein, e.g., as described in Table 3 or 15, or a nucleotide sequence having at least one, two or three modifications but not more than 30, 20 or 10 modifications relative to any of the aforesaid nucleotide sequences. In some embodiments, the nucleotide sequence encoding a GBA protein or functional variant thereof is a codon optimized nucleotide sequence.

[0890] In some embodiments, the nucleotide sequence encoding a GBA protein comprises a nucleotide sequence provided in WO 2022/026409 (e.g., in Table 3 or 15 of WO 2022/026409), the contents of which are hereby incorporated by reference in their entirety, or a sequence at least 80% (e.g., at least 85%, 90%, 95%, 96%, 97%, 98%, or 99%) identical thereto.

TABLE 3
Exemplary GCase Sequences

| SEQ ID NO: | Type | Species | Description |
|---|---|---|---|
| 1740 | Protein | Homo sapiens | GBA protein NP_000148.2 |
| 1741 | DNA | Homo sapiens | GBA mRNA transcript variant 1 |
| | | | NM_000157.4 |
| 1742 | Protein | Homo sapiens | GBA protein NP_001005741.1 |
| 1743 | DNA | Homo sapiens | GBA mRNA transcript variant 2 |
| | | | NM_01005741.3 |
| 1744 | Protein | Homo sapiens | GBA protein NP_001005742.1 |
| 1745 | DNA | Homo sapiens | GBA mRNA transcript variant 3 |
| | | | NM_001005742.3 |
| 1746 | Protein | Homo sapiens | GBA protein NP_001165282.1 |
| 1747 | DNA | Homo sapiens | GBA mRNA transcript variant 4 |
| | | | NM_001171811.2 |
| 1748 | Protein | Homo sapiens | GBA protein NP_001165283.1 |
| 1749 | DNA | Homo sapiens | GBA mRNA transcript variant 5 |
| | | | NM_001171812.2 |

TABLE 15
Exemplary GCase Sequences

| | | SEQ |
|---|---|---|
| Description | Sequence | ID NO: |
| GBA Variant 1 | ATGGAATTCTCTAGCCCATCTAGAGAGGAATGTCCTAAGCCTCTGTCAA | 1772 |
| (signal sequence | GAGTGTCCATCATGGCCGGCAGCCTGACAGGCCTGCTGCTGCTGCAGGC | |
| underlined)-nt | CGTGTCCTGGGCCAGTGGAGCCCGGCCCTGCATCCCTAAGTCCTTCGGC | |
| | TATTCTAGCGTGGTCTGCGTGTGTAATGCCACTTACTGCGACAGCTTCG | |
| | ACCCTCCTACCTTCCCCGCCCTTGGAACATTCAGCAGATACGAGAGCAC | |
| | CAGAAGCGGCAGAAGAATGGAACTGAGCATGGGCCCAATCCAGGCCAAC | |
| | CACACCGGCACCGGCCTGCTGCTGACACTGCAACCTGAGCAGAAGTTCC | |
| | AGAAGGTGAAGGGATTTGGAGGCGCCATGACCGACGCTGCTGCTCTGAA | |
| | CATCCTGGCCCTCTCCCCACCTGCTCAGAACCTGCTGCTTAAAAGCTAC | |
| | TTCAGCGAGGAAGGCATCGGCTATAACATCATCAGAGTGCCCATGGCCA | |
| | GCTGCGACTTCAGCATCAGAACATACACCTACGCCGATACACCTGATGA | |
| | CTTCCAACTGCACAACTTCAGCCTGCCTGAAGAGGACACAAAGCTGAAA | |
| | ATCCCCCTGATCCACCGGGCCCTGCAGCTGGCCCAGAGACCTGTGAGCC | |
| | TGCTGGCCTCTCCTTGGACAAGCCCCACCTGGCTGAAGACCAATGGAGC | |
| | TGTGAACGGCAAGGGCAGCCTGAAGGGCCAGCCCGGCGACATCTACCAC | |
| | CAAACCTGGGCTCGCTACTTCGTGAAATTCCTGGACGCCTACGCTGAGC | |
| | ATAAGCTGCAATTTTGGGCCGTTACAGCCGAGAACGAGCCTTCTGCCGG | |
| | CCTGCTGTCTGGATATCCTTTCCAGTGCCTGGGCTTCACCCCTGAGCAC | |
| | CAGAGAGACTTTATCGCCAGAGATCTGGGGCCTACCCTGGCTAACAGCA | |
| | CACACCACAACGTGCGGCTGCTGATGCTGGACGATCAGAGGCTGCTGCT | |
| | CCCCCACTGGGCCAAGGTGGTGCTGACAGATCCGGAGGCCGCCAAATAC | |
| | GTGCACGGCATCGCCGTCCACTGGTACCTGGATTTCCTGGCCCCTGCCA | |
| | AGGCCACCCTGGGCGAGACACATAGACTGTTTCCTAATACCATGCTGTT | |
| | CGCCAGCGAGGCCTGCGTGGGCAGCAAGTTCTGGGAACAGAGCGTGCGG | |
| | CTGGGCAGCTGGGACAGAGGAATGCAGTACAGCCACAGCATCATTACCA | |
| | ACCTGCTGTACCACGTGGTGGGCTGGACCGACTGGAACCTGGCCCTGAA | |
| | CCCCGAAGGCGGCCCCAACTGGGTGCGGAACTTCGTGGACTCTCCTATC | |
| | ATCGTGGATATTACCAAGGATACCTTTTACAAGCAGCCTATGTTCTACC | |
| | ACCTGGGCCACTTCAGCAAGTTCATCCCTGAGGGCTCTCAGCGGGTGGG | |
| | CCTGGTGGCCTCTCAGAAAAACGACCTGGATGCCGTTGCCCTGATGCAC | |
| | CCCGACGGCAGCGCCGTGGTGGTCGTCCTGAATAGAAGCTCCAAGGACG | |
| | TGCCTCTGACCATCAAGGACCCCGCTGTGGGATTTCTGGAAACCATCAG | |
| | CCCTGGCTACAGCATCCACACCTACCTGTGGCGGCGGCAG | |
| GBA Variant 1 | GCCCGGCCCTGCATCCCTAAGTCCTTCGGCTATTCTAGCGTGGTCTGCG | 1773 |
| (no signal | TGTGTAATGCCACTTACTGCGACAGCTTCGACCCTCCTACCTTCCCCGC | |
| sequence)-nt | CCTTGGAACATTCAGCAGATACGAGAGCACCAGAAGCGGCAGAAGAATG | |
| | GAACTGAGCATGGGCCCAATCCAGGCCAACCACACCGGCACCGGCCTGC | |
| | TGCTGACACTGCAACCTGAGCAGAAGTTCCAGAAGGTGAAGGGATTTGG | |
| | AGGCGCCATGACCGACGCTGCTGCTCTGAACATCCTGGCCCTCTCCCCA | |
| | CCTGCTCAGAACCTGCTGCTTAAAAGCTACTTCAGCGAGGAAGGCATCG | |
| | GCTATAACATCATCAGAGTGCCCATGGCCAGCTGCGACTTCAGCATCAG | |
| | AACATACACCTACGCCGATACACCTGATGACTTCCAACTGCACAACTTC | |
| | AGCCTGCCTGAAGAGGACACAAAGCTGAAAATCCCCCTGATCCACCGGG | |
| | CCCTGCAGCTGGCCCAGAGACCTGTGAGCCTGCTGGCCTCTCCTTGGAC | |
| | AAGCCCCACCTGGCTGAAGACCAATGGAGCTGTGAACGGCAAGGGCAGC | |
| | CTGAAGGGCCAGCCCGGCGACATCTACCACCAAACCTGGGCTCGCTACT | |
| | TCGTGAAATTCCTGGACGCCTACGCTGAGCATAAGCTGCAATTTTGGGC | |
| | CGTTACAGCCGAGAACGAGCCTTCTGCCGGCCTGCTGTCTGGATATCCT | |
| | TTCCAGTGCCTGGGCTTCACCCCTGAGCACCAGAGAGACTTTATCGCCA | |
| | GAGATCTGGGGCCTACCCTGGCTAACAGCACACACCACAACGTGCGGCT | |
| | GCTGATGCTGGACGATCAGAGGCTGCTGCTCCCCCACTGGGCCAAGGTG | |
| | GTGCTGACAGATCCGGAGGCCGCCAAATACGTGCACGGCATCGCCGTCC | |
| | ACTGGTACCTGGATTTCCTGGCCCCTGCCAAGGCCACCCTGGGCGAGAC | |
| | ACATAGACTGTTTCCTAATACCATGCTGTTCGCCAGCGAGGCCTGCGTG | |
| | GGCAGCAAGTTCTGGGAACAGAGCGTGCGGCTGGGCAGCTGGGACAGAG | |
| | GAATGCAGTACAGCCACAGCATCATTACCAACCTGCTGTACCACGTGGT | |
| | GGGCTGGACCGACTGGAACCTGGCCCTGAACCCCGAAGGCGGCCCCAAC | |
| | TGGGTGCGGAACTTCGTGGACTCTCCTATCATCGTGGATATTACCAAGG | |
| | ATACCTTTTACAAGCAGCCTATGTTCTACCACCTGGGCCACTTCAGCAA | |
| | GTTCATCCCTGAGGGCTCTCAGCGGGTGGGCCTGGTGGCCTCTCAGAAA | |
| | AACGACCTGGATGCCGTTGCCCTGATGCACCCCGACGGCAGCGCCGTGG | |
| | TGGTCGTCCTGAATAGAAGCTCCAAGGACGTGCCTCTGACCATCAAGGA | |
| | CCCCGCTGTGGGATTTCTGGAAACCATCAGCCCTGGCTACAGCATCCAC | |
| | ACCTACCTGTGGCGGCGGCAG | |
| GBA Variant 1 | MEFSSPSREECPKPLSRVSIMAGSLTGLLLLQAVSWASGARPCIPKSFG | 1774 |
| (signal sequence | YSSVVCVCNATYCDSFDPPTFPALGTFSRYESTRSGRRMELSMGPIQAN | |
| underlined)-aa | HTGTGLLLTLQPEQKFQKVKGFGGAMTDAAALNILALSPPAQNLLLKSY | |
| | FSEEGIGYNIIRVPMASCDFSIRTYTYADTPDDFQLHNFSLPEEDTKLK | |
| | IPLIHRALQLAQRPVSLLASPWTSPTWLKTNGAVNGKGSLKGQPGDIYH | |
| | QTWARYFVKFLDAYAEHKLQFWAVTAENEPSAGLLSGYPFQCLGFTPEH | |
| | QRDFIARDLGPTLANSTHHNVRLLMLDDQRLLLPHWAKVVLTDPEAAKY | |
| | VHGIAVHWYLDFLAPAKATLGETHRLFPNTMLFASEACVGSKFWEQSVR | |
| | LGSWDRGMQYSHSIITNLLYHVVGWTDWNLALNPEGGPNWVRNFVDSPI | |
| | IVDITKDTFYKQPMFYHLGHFSKFIPEGSQRVGLVASQKNDLDAVALMH | |
| | PDGSAVVVVLNRSSKDVPLTIKDPAVGFLETISPGYSIHTYLWRRQ | |
| GBA Variant 1 | ARPCIPKSFGYSSVVCVCNATYCDSFDPPTFPALGTFSRYESTRSGRRM | 1775 |
| (no signal | ELSMGPIQANHTGTGLLLTLQPEQKFQKVKGFGGAMTDAAALNILALSP | |
| sequence)-aa | PAQNLLLKSYFSEEGIGYNIIRVPMASCDFSIRTYTYADTPDDFQLHNF | |
| | SLPEEDTKLKIPLIHRALQLAQRPVSLLASPWTSPTWLKTNGAVNGKGS | |
| | LKGQPGDIYHQTWARYFVKFLDAYAEHKLQFWAVTAENEPSAGLLSGYP | |
| | FQCLGFTPEHQRDFIARDLGPTLANSTHHNVRLLMLDDORLLLPHWAKV | |
| | VLTDPEAAKYVHGIAVHWYLDFLAPAKATLGETHRLFPNTMLFASEACV | |
| | GSKFWEQSVRLGSWDRGMQYSHSIITNLLYHVVGWTDWNLALNPEGGPN | |
| | WVRNFVDSPIIVDITKDTFYKQPMFYHLGHFSKFIPEGSQRVGLVASQK | |
| | NDLDAVALMHPDGSAVVVVLNRSSKDVPLTIKDPAVGFLETISPGYSIH | |
| | TYLWRRQ | |
| GBA Variant 2 | ATGGAGTTTTCAAGTCCTTCCAGAGAGGAATGTCCCAAGCCTTTGAGTA | 1776 |
| (signal sequence | GGGTAAGCATCATGGCTGGCAGCCTCACAGGATTGCTTCTACTTCAGGC | |
| underlined)-nt | AGTGTCGTGGGCATCAGGTGCCCGCCCCTGCATCCCTAAAAGCTTCGGC | |
| | TACAGCTCGGTGGTGTGTGTCTGCAATGCCACATACTGTGACTCCTTTG | |
| | ACCCCCCGACCTTTCCTGCCCTTGGTACCTTCAGCCGCTATGAGAGTAC | |
| | ACGCAGTGGGCGACGGATGGAGCTGAGTATGGGGCCCATCCAGGCTAAT | |
| | CACACGGGCACAGGCCTGCTACTGACCCTGCAGCCAGAACAGAAGTTCC | |
| | AGAAAGTGAAGGGATTTGGAGGGGCCATGACAGATGCTGCTGCTCTCAA | |
| | CATCCTTGCCCTGTCACCCCCTGCCCAAAATTTGCTACTTAAATCGTAC | |
| | TTCTCTGAAGAAGGAATCGGATATAACATCATCCGGGTACCCATGGCCA | |
| | GCTGTGACTTCTCCATCCGCACCTACACCTATGCAGACACCCCTGATGA | |
| | TTTCCAGTTGCACAACTTCAGCCTCCCAGAGGAAGATACCAAGCTCAAG | |
| | ATACCCCTGATTCACCGAGCCCTGCAGTTGGCCCAGCGTCCCGTTTCAC | |
| | TCCTTGCCAGCCCCTGGACATCACCCACTTGGCTCAAGACCAATGGAGC | |
| | GGTGAATGGGAAGGGGTCACTCAAGGGACAGCCCGGAGACATCTACCAC | |
| | CAGACCTGGGCCAGATACTTTGTGAAGTTCCTGGATGCCTATGCTGAGC | |
| | ACAAGTTACAGTTCTGGGCAGTGACAGCTGAAAATGAGCCTTCTGCTGG | |
| | GCTGTTGAGTGGATACCCCTTCCAGTGCCTGGGCTTCACCCCTGAACAT | |
| | CAGCGAGACTTCATTGCCCGTGACCTAGGTCCTACCCTCGCCAACAGTA | |
| | CTCACCACAATGTCCGCCTACTCATGCTGGATGACCAACGCTTGCTGCT | |
| | GCCCCACTGGGCAAAGGTGGTACTGACAGACCCAGAAGCAGCTAAATAT | |
| | GTTCATGGCATTGCTGTACATTGGTACCTGGACTTTCTGGCTCCAGCCA | |
| | AAGCCACCCTAGGGGAGACACACCGCCTGTTCCCCAACACCATGCTCTT | |
| | TGCCTCAGAGGCCTGTGTGGGCTCCAAGTTCTGGGAGCAGAGTGTGCGG | |
| | CTAGGCTCCTGGGATCGAGGGATGCAGTACAGCCACAGCATCATCACGA | |
| | ACCTCCTGTACCATGTGGTCGGCTGGACCGACTGGAACCTTGCCCTGAA | |
| | CCCCGAAGGAGGACCCAATTGGGTGCGTAACTTTGTCGACAGTCCCATC | |
| | ATTGTAGACATCACCAAGGACACGTTTTACAAACAGCCCATGTTCTACC | |
| | ACCTTGGCCACTTCAGCAAGTTCATTCCTGAGGGCTCCCAGAGAGTGGG | |
| | GCTGGTTGCCAGTCAGAAGAACGACCTGGACGCAGTGGCACTGATGCAT | |
| | CCCGATGGCTCTGCTGTTGTGGTCGTGCTAAACCGCTCCTCTAAGGATG | |
| | TGCCTCTTACCATCAAGGATCCTGCTGTGGGCTTCCTGGAGACAATCTC | |
| | ACCTGGCTACTCCATTCACACCTACCTGTGGCGTCGCCAG | |
| GBA Variant 2 | GCCCGCCCCTGCATCCCTAAAAGCTTCGGCTACAGCTCGGTGGTGTGTG | 1777 |
| (no signal | TCTGCAATGCCACATACTGTGACTCCTTTGACCCCCCGACCTTTCCTGC | |
| sequence)-nt | CCTTGGTACCTTCAGCCGCTATGAGAGTACACGCAGTGGGCGACGGATG | |
| | GAGCTGAGTATGGGGCCCATCCAGGCTAATCACACGGGCACAGGCCTGC | |
| | TACTGACCCTGCAGCCAGAACAGAAGTTCCAGAAAGTGAAGGGATTTGG | |
| | AGGGGCCATGACAGATGCTGCTGCTCTCAACATCCTTGCCCTGTCACCC | |
| | CCTGCCCAAAATTTGCTACTTAAATCGTACTTCTCTGAAGAAGGAATCG | |
| | GATATAACATCATCCGGGTACCCATGGCCAGCTGTGACTTCTCCATCCG | |
| | CACCTACACCTATGCAGACACCCCTGATGATTTCCAGTTGCACAACTTC | |
| | AGCCTCCCAGAGGAAGATACCAAGCTCAAGATACCCCTGATTCACCGAG | |
| | CCCTGCAGTTGGCCCAGCGTCCCGTTTCACTCCTTGCCAGCCCCTGGAC | |
| | ATCACCCACTTGGCTCAAGACCAATGGAGCGGTGAATGGGAAGGGGTCA | |
| | CTCAAGGGACAGCCCGGAGACATCTACCACCAGACCTGGGCCAGATACT | |
| | TTGTGAAGTTCCTGGATGCCTATGCTGAGCACAAGTTACAGTTCTGGGC | |
| | AGTGACAGCTGAAAATGAGCCTTCTGCTGGGCTGTTGAGTGGATACCCC | |
| | TTCCAGTGCCTGGGCTTCACCCCTGAACATCAGCGAGACTTCATTGCCC | |
| | GTGACCTAGGTCCTACCCTCGCCAACAGTACTCACCACAATGTCCGCCT | |
| | ACTCATGCTGGATGACCAACGCTTGCTGCTGCCCCACTGGGCAAAGGTG | |
| | GTACTGACAGACCCAGAAGCAGCTAAATATGTTCATGGCATTGCTGTAC | |
| | ATTGGTACCTGGACTTTCTGGCTCCAGCCAAAGCCACCCTAGGGGAGAC | |
| | ACACCGCCTGTTCCCCAACACCATGCTCTTTGCCTCAGAGGCCTGTGTG | |
| | GGCTCCAAGTTCTGGGAGCAGAGTGTGCGGCTAGGCTCCTGGGATCGAG | |
| | GGATGCAGTACAGCCACAGCATCATCACGAACCTCCTGTACCATGTGGT | |
| | CGGCTGGACCGACTGGAACCTTGCCCTGAACCCCGAAGGAGGACCCAAT | |
| | TGGGTGCGTAACTTTGTCGACAGTCCCATCATTGTAGACATCACCAAGG | |
| | ACACGTTTTACAAACAGCCCATGTTCTACCACCTTGGCCACTTCAGCAA | |
| | GTTCATTCCTGAGGGCTCCCAGAGAGTGGGGCTGGTTGCCAGTCAGAAG | |
| | AACGACCTGGACGCAGTGGCACTGATGCATCCCGATGGCTCTGCTGTTG | |
| | TGGTCGTGCTAAACCGCTCCTCTAAGGATGTGCCTCTTACCATCAAGGA | |
| | TCCTGCTGTGGGCTTCCTGGAGACAATCTCACCTGGCTACTCCATTCAC | |
| | ACCTACCTGTGGCGTCGCCAG | |
| GBA Variant 2 | MEFSSPSREECPKPLSRVSIMAGSLTGLLLLQAVSWASGARPCIPKSFG | 1778 |
| (signal sequence | YSSVVCVCNATYCDSFDPPTFPALGTFSRYESTRSGRRMELSMGPIQAN | |
| underlined)-aa | HTGTGLLLTLQPEQKFQKVKGFGGAMTDAAALNILALSPPAQNLLLKSY | |
| | FSEEGIGYNIIRVPMASCDFSIRTYTYADTPDDFQLHNFSLPEEDTKLK | |
| | IPLIHRALQLAQRPVSLLASPWTSPTWLKTNGAVNGKGSLKGQPGDIYH | |
| | QTWARYFVKFLDAYAEHKLQFWAVTAENEPSAGLLSGYPFQCLGFTPEH | |
| | QRDFIARDLGPTLANSTHHNVRLLMLDDQRLLLPHWAKVVLTDPEAAKY | |
| | VHGIAVHWYLDFLAPAKATLGETHRLFPNTMLFASEACVGSKFWEQSVR | |
| | LGSWDRGMQYSHSIITNLLYHVVGWTDWNLALNPEGGPNWVRNFVDSPI | |
| | IVDITKDTFYKQPMFYHLGHFSKFIPEGSQRVGLVASQKNDLDAVALMH | |
| | PDGSAVVVVLNRSSKDVPLTIKDPAVGFLETISPGYSIHTYLWRRQ | |
| GBA Variant 2 | ARPCIPKSFGYSSVVCVCNATYCDSFDPPTFPALGTFSRYESTRSGRRM | 1779 |
| (no signal | ELSMGPIQANHTGTGLLLTLQPEQKFQKVKGFGGAMTDAAALNILALSP | |
| sequence)-aa | PAQNLLLKSYFSEEGIGYNIIRVPMASCDFSIRTYTYADTPDDFQLHNF | |
| | SLPEEDTKLKIPLIHRALQLAQRPVSLLASPWTSPTWLKTNGAVNGKGS | |
| | LKGQPGDIYHQTWARYFVKFLDAYAEHKLQFWAVTAENEPSAGLLSGYP | |
| | FQCLGFTPEHQRDFIARDLGPTLANSTHHNVRLLMLDDQRLLLPHWAKV | |
| | VLTDPEAAKYVHGIAVHWYLDFLAPAKATLGETHRLFPNTMLFASEACV | |
| | GSKFWEQSVRLGSWDRGMQYSHSIITNLLYHVVGWTDWNLALNPEGGPN | |
| | WVRNFVDSPIIVDITKDTFYKQPMFYHLGHFSKFIPEGSQRVGLVASQK | |
| | NDLDAVALMHPDGSAVVVVLNRSSKDVPLTIKDPAVGFLETISPGYSIH | |
| | TYLWRRQ | |
| GBA Variant 3 | atggaattcagcagccccagcagagaggaatgccccaagcctctgagcc | 1780 |
| (signal sequence | gggtgtcaatcatggccggatctctgacaggactgctgctgcttcaggc | |
| underlined)-nt | cgtgtcttgggcttctggcgctagaccttgcatccccaagagcttcggc | |
| | tacagcagcgtcgtgtgcgtgtgcaatgccacctactgcgacagcttcg | |
| | accctcctacctttcctgctctgggcaccttcagcagatacgagagcac | |
| | cagatccggcagacggatggaactgagcatgggacccatccaggccaat | |
| | cacacaggcactggcctgctgctgacactgcagcctgagcagaaattcc | |
| | agaaagtgaaaggcttcggcggagccatgacagatgccgccgctctgaa | |
| | tatcctggctctgtctccaccagctcagaacctgctgctcaagagctac | |
| | ttcagcgaggaaggcatcggctacaacatcatcagagtgcccatggcca | |
| | gctgcgacttcagcatcaggacctacacctacgccgacacacccgacga | |
| | tttccagctgcacaacttcagcctgcctgaagaggacaccaagctgaag | |
| | atccctctgatccacagagccctgcagctggcacaaagacccgtgtcac | |
| | tgctggcctctccatggacatctcccacctggctgaaaacaaatggcgc | |
| | cgtgaatggcaagggcagcctgaaaggccaacctggcgacatctaccac | |
| | cagacctgggccagatacttcgtgaagttcctggacgcctatgccgagc | |
| | acaagctgcagttttgggccgtgacagccgagaacgaaccttctgctgg | |
| | actgctgagcggctacccctttcagtgcctgggctttacacccgagcac | |
| | cagcgggactttatcgcccgtgatctgggacccacactggccaatagca | |
| | cccaccataatgtgcggctgctgatgctggacgaccagagactgcttct | |
| | gccccactgggctaaagtggtgctgacagatcctgaggccgccaaatac | |
| | gtgcacggaatcgccgtgcactggtatctggactttctggcccctgcca | |
| | aggccacactgggagagacacacagactgttccccaacaccatgctgtt | |
| | cgccagcgaagcctgtgtgggcagcaagttttgggaacagagcgtgcgg | |
| | ctcggcagctgggatagaggcatgcagtacagccacagcatcatcacca | |
| | acctgctgtaccacgtcgtcggctggaccgactggaatctggccctgaa | |
| | tcctgaaggcggccctaactgggtccgaaacttcgtggacagccccatc | |
| | atcgtggacatcaccaaggacaccttctacaagcagcccatgttctacc | |
| | acctgggacacttcagcaagttcatccccgagggctctcagcgcgttgg | |
| | actggtggcttcccagaagaacgatctggacgccgtggctctgatgcac | |
| | cctgatggatctgctgtggtggtggtcctgaaccgcagcagcaaagatg | |
| | tgcccctgaccatcaaggatcccgccgtgggattcctggaaacaatcag | |
| | ccctggctactccatccacacctacctgtggcgtagacag | |
| GBA Variant 3 | gctagaccttgcatccccaagagcttcggctacagcagcgtcgtgtgcg | 1781 |
| (no signal | tgtgcaatgccacctactgcgacagcttcgaccctcctacctttcctgc | |
| sequence)-nt | tctgggcaccttcagcagatacgagagcaccagatccggcagacggatg | |
| | gaactgagcatgggacccatccaggccaatcacacaggcactggcctgc | |
| | tgctgacactgcagcctgagcagaaattccagaaagtgaaaggcttcgg | |
| | cggagccatgacagatgccgccgctctgaatatcctggctctgtctcca | |
| | ccagctcagaacctgctgctcaagagctacttcagcgaggaaggcatcg | |
| | gctacaacatcatcagagtgcccatggccagctgcgacttcagcatcag | |
| | gacctacacctacgccgacacacccgacgatttccagctgcacaacttc | |
| | agcctgcctgaagaggacaccaagctgaagatccctctgatccacagag | |
| | ccctgcagctggcacaaagacccgtgtcactgctggcctctccatggac | |
| | atctcccacctggctgaaaacaaatggcgccgtgaatggcaagggcagc | |
| | ctgaaaggccaacctggcgacatctaccaccagacctgggccagatact | |
| | tcgtgaagttcctggacgcctatgccgagcacaagctgcagttttgggc | |
| | cgtgacagccgagaacgaaccttctgctggactgctgagcggctacccc | |
| | tttcagtgcctgggctttacacccgagcaccagcgggactttatcgccc | |
| | gtgatctgggacccacactggccaatagcacccaccataatgtgcggct | |
| | gctgatgctggacgaccagagactgcttctgccccactgggctaaagtg | |
| | gtgctgacagatcctgaggccgccaaatacgtgcacggaatcgccgtgc | |
| | actggtatctggactttctggcccctgccaaggccacactgggagagac | |
| | acacagactgttccccaacaccatgctgttcgccagcgaagcctgtgtg | |
| | ggcagcaagttttgggaacagagcgtgcggctcggcagctgggatagag | |
| | gcatgcagtacagccacagcatcatcaccaacctgctgtaccacgtcgt | |
| | cggctggaccgactggaatctggccctgaatcctgaaggcggccctaac | |
| | tgggtccgaaacttcgtggacagccccatcatcgtggacatcaccaagg | |
| | acaccttctacaagcagcccatgttctaccacctgggacacttcagcaa | |
| | gttcatccccgagggctctcagcgcgttggactggtggcttcccagaag | |
| | aacgatctggacgccgtggctctgatgcaccctgatggatctgctgtgg | |
| | tggtggtcctgaaccgcagcagcaaagatgtgcccctgaccatcaagga | |
| | tcccgccgtgggattcctggaaacaatcagccctggctactccatccac | |
| | acctacctgtggcgtagacag | |
| GBA Variant 3 | MEFSSPSREECPKPLSRVSIMAGSLTGLLLLQAVSWASGARPCIPKSFG | 1782 |
| (signal sequence | YSSVVCVCNATYCDSFDPPTFPALGTFSRYESTRSGRRMELSMGPIQAN | |
| underlined)-aa | HTGTGLLLTLQPEQKFQKVKGFGGAMTDAAALNILALSPPAQNLLLKSY | |
| | FSEEGIGYNIIRVPMASCDFSIRTYTYADTPDDFQLHNFSLPEEDTKLK | |
| | IPLIHRALQLAQRPVSLLASPWTSPTWLKTNGAVNGKGSLKGQPGDIYH | |
| | QTWARYFVKFLDAYAEHKLQFWAVTAENEPSAGLLSGYPFQCLGFTPEH | |
| | QRDFIARDLGPTLANSTHHNVRLLMLDDQRLLLPHWAKVVLTDPEAAKY | |
| | VHGIAVHWYLDFLAPAKATLGETHRLFPNTMLFASEACVGSKFWEQSVR | |
| | LGSWDRGMQYSHSIITNLLYHVVGWTDWNLALNPEGGPNWVRNFVDSPI | |
| | IVDITKDTFYKQPMFYHLGHFSKFIPEGSQRVGLVASQKNDLDAVALMH | |
| | PDGSAVVVVLNRSSKDVPLTIKDPAVGFLETISPGYSIHTYLWRRQ | |
| GBA Variant 3 | ARPCIPKSFGYSSVVCVCNATYCDSFDPPTFPALGTFSRYESTRSGRRM | 1783 |
| (no signal | ELSMGPIQANHTGTGLLLTLQPEQKFQKVKGFGGAMTDAAALNILALSP | |
| sequence)-aa | PAQNLLLKSYFSEEGIGYNIIRVPMASCDFSIRTYTYADTPDDFQLHNF | |
| | SLPEEDTKLKIPLIHRALQLAQRPVSLLASPWTSPTWLKINGAVNGKGS | |
| | LKGQPGDIYHQTWARYFVKFLDAYAEHKLQFWAVTAENEPSAGLLSGYP | |
| | FQCLGFTPEHQRDFIARDLGPTLANSTHHNVRLLMLDDQRLLLPHWAKV | |
| | VLTDPEAAKYVHGIAVHWYLDFLAPAKATLGETHRLFPNTMLFASEACV | |
| | GSKFWEQSVRLGSWDRGMQYSHSIITNLLYHVVGWTDWNLALNPEGGPN | |
| | WVRNFVDSPIIVDITKDTFYKQPMFYHLGHFSKFIPEGSQRVGLVASQK | |
| | NDLDAVALMHPDGSAVVVVLNRSSKDVPLTIKDPAVGFLETISPGYSIH | |
| | TYLWRRQ | |

[0891] In some embodiments, the encoded GBA protein or functional variant thereof comprises the amino acid sequence of any one of SEQ ID NOs: 1740, 1742, 1744, 1746, 1748, 1774, 1775, 1778, 1779, 1782, or 1783, or an amino acid sequence substantially identical (e.g., having at least about 70%, 75%, 80%, 85%, 90%, 92%, 95%, 97%, 98%, or 99% sequence identity) to any of the aforesaid sequences. In some embodiments, the encoded GBA protein or functional variant thereof comprises the amino acid sequence of any one of SEQ ID NOs: 1740, 1742, 1744, 1746, 1748, 1774, 1775, 1778, 1779, 1782, or 1783, or an amino acid having at least one, two or three modifications but not more than 30, 20 or 10 modifications relative to any of the aforesaid amino acid sequences. In some embodiments, the encoded GBA protein or functional variant thereof comprises an amino acid sequence encoded by the nucleotide sequence of any of SEQ ID NOs: 1741, 1743, 1744, 1745, 1747, 1749, 1772, 1773, 1776, 1777, 1780, or 1781, or a nucleotide sequence substantially identical (e.g., having at least about 70%, 75%, 80%, 85%, 90%, 92%, 95%, 97%, 98%, or 99% sequence identity) to any of the aforesaid sequences.

[0892] In some embodiments, the nucleotide sequence encoding the GBA protein or functional variant thereof comprises the nucleotide sequence of any one of SEQ ID NOs: 1741, 1743, 1744, 1745, 1747, 1749, 1772, 1773, 1776, 1777, 1780, or 1781, or a nucleotide sequence substantially identical (e.g., having at least about 70%, 75%, 80%, 85%, 90%, 92%, 95%, 97%, 98%, or 99% sequence identity) to any of the aforesaid sequences. In some embodiments, the nucleic acid sequence encoding the GBA protein or functional variant thereof comprises the nucleotide sequence of any one of SEQ ID NOs: 1741, 1743, 1744, 1745, 1747, 1749, 1772, 1773, 1776, 1777, 1780, or 1781, or a nucleotide sequence having at least one, two or three modifications but not more than 30, 20 or 10 modifications relative to any of the aforesaid nucleotide sequences. In some embodiments, the nucleotide sequence encoding the GBA protein or functional variant thereof comprises the nucleotide sequence of SEQ ID NO: 1773, a nucleotide sequence substantially identical (e.g., having at least about 70%, 75%, 80%, 85%, 90%, 92%, 95%, 97%, 98%, or 99% sequence identity) to SEQ ID NO: 1773, or a nucleotide sequence having at least one, two or three modifications but not more than 30, 20 or 10 modifications relative to SEQ ID NO: 1773. In some embodiments, the nucleotide sequence encoding the GBA protein or functional variant thereof does not comprise a stop codon. In some embodiments, the nucleotide sequence encoding the GBA protein of functional variant thereof is a codon optimized nucleotide sequence.

[0893] In some embodiments, a codon optimized nucleotide sequence encoding a GBA protein described herein (e.g., SEQ ID NO: 1773) replaces a donor splice site, e.g., a nucleotide sequence comprising the sequence of AGGGTAAGC or nucleotides 49 of the 117 numbered according to the nucleotide sequence of SEQ ID NO: 1776, with the nucleotide sequence of AGAGTGTCC, e.g., comprising at least one, two, three, or four modifications, e.g., mutations relative to the nucleotide sequence of AGGGTAAGC, or nucleotides 49 of the 117 numbered according to the nucleotide sequence of SEQ ID NO: 1776. In some embodiments, a codon optimized nucleotide sequence encoding a GBA protein described herein (e.g., SEQ ID NO: 1773) contains more than 121, 122, 123, 124, 125, 126, 127, 128, 129, 130, 131, 132, 133, 134, 135, 136, 137, 138, 139, 140 or more unique modifications, e.g., mutations, compared to the nucleotide sequence of SEQ ID NO: 1776. In some embodiments, a codon optimized nucleotide sequence of a GBA protein described herein (e.g., SEQ ID NO: 1773) comprises a unique GC content profile. Without wishing to be bound by theory, it is believed in some embodiments, that altering the GC-content of a nucleotide sequence of a GBA protein described herein enhances the expression of the codon optimized nucleotide sequence in a cell (e.g., a human cell or a neuronal cell).

[0894] In some embodiments, the viral genome comprises a payload region encoding a GCase protein. The encoded GCase protein may be derived from any species, such as, but not limited to human, non-human primate, or rodent.

[0895] In some embodiments, the viral genome comprises a payload region encoding a human (Homo sapiens) GCase protein, or a variant thereof.

[0896] Various embodiments of the disclosure herein provide an adeno-associated viral (AAV) particle comprising a viral genome, the viral genome comprising at least one inverted terminal repeat region and a nucleic acid sequence encoding a polypeptide having at least 90% sequence identity to a human GCase protein sequence, or a fragment thereof, as provided in Table 3. In some embodiments, the AAV viral genome comprises at least one inverted terminal repeat region and a nucleic acid sequence encoding a polypeptide having at least 95% sequence identity to a GCase protein sequence, or a fragment thereof, as provided in Table 3. In some embodiments, the AAV viral genome comprises at least one inverted terminal repeat region and a nucleic acid sequence encoding a polypeptide having at least 98% sequence identity to a GCase protein sequence, or a fragment thereof, as provided in Table 3. In some embodiments, the AAV viral genome comprises at least one inverted terminal repeat region and a nucleic acid sequence encoding a polypeptide having at least 99% sequence identity to a GCase protein sequence, or a fragment thereof, as provided in Table 3. In some embodiments, the AAV viral genome comprises at least one inverted terminal repeat region and a nucleic acid sequence encoding a GCase protein sequence, or a fragment thereof, provided in Table 3.

[0897] In some embodiments, the viral genome comprises a nucleic acid sequence encoding a recombinant glucocerebrosidase according to Imiglucerase (Cerezyme(Genzyme Corp.), a recombinant GCase for use in treating Gaucher disease; Velaglucerase (Vpriv)(Shire Human Genetic Therapies Inc.), a recombinant GCase for use in treating Gaucher disease; or U.S. Pat. Nos. 8,227,230, 8,741,620, or U.S. Pat. No. 8,790,641, each incorporated by reference herein, describing Taliglucerase alfa (Elelyso)(Pfizer Inc.), a recombinant GCase for use in treating Gaucher disease.

[0898] In some embodiments, the GCase protein is derived from a GBA protein encoding sequence of a non-human primate, such as the cynomolgus monkey, Macaca fascicularis. Certain embodiments provide the GCase protein as a humanized version of a Macaca fascicularis sequence.

[0899] In some embodiments, the viral genome comprises a payload region encoding a cynomolgus or crab-eating (long-tailed) macaque (Macaca fascicularis) GCase protein, or a variant thereof.

[0900] In some embodiments, the viral genome comprises a payload region encoding a rhesus macaque (Macaca mulatta) GCase protein, or a variant thereof.

[0901] In some embodiments, the GCase protein may comprise an amino acid sequence with 50%, 51%, 52%, 53%, 54%, 55%, 56%, 57%, 58%, 59%, 60%, 61%, 62%, 63%, 64%, 65%, 66%, 67%, 68%, 69%, 70%, 71%, 72%, 73%, 74%, 75%, 76%, 77%, 78%, 79%, 80%, 81%, 82%, 83%, 84%, 85%, 86%, 87%, 88%, 89%, 90%, 91%, 92%, 93%, 94%, 95%, 96%, 97%, 98%, 99%, or 100% identity to any of the those described above and provided in Table 3.

[0902] In some embodiments, the GCase protein may be encoded by a nucleic acid sequence with 50%, 51%, 52%, 53%, 54%, 55%, 56%, 57%, 58%, 59%, 60%, 61%, 62%, 63%, 64%, 65%, 66%, 67%, 68%, 69%, 70%, 71%, 72%, 73%, 74%, 75%, 76%, 77%, 78%, 79%, 80%, 81%, 82%, 83%, 84%, 85%, 86%, 87%, 88%, 89%, 90%, 91%, 92%, 93%, 94%, 95%, 96%, 97%, 98%, 99%, or 100% identity to any of the those described above and provided in Table 3.

[0903] The GCase protein payloads as described herein can encode any GCase protein, or any portion or derivative of a GCase protein, and are not limited to the GCase proteins or protein-encoding sequences provided in Table 3.

### Payload Component: Enhancement Element

[0904] In some embodiments, a viral genome described herein encoding a GBA protein comprises an enhancement element or functional variant thereof. In some embodiments, the encoded enhancement comprises a prosaposin (PSAP) protein, a saposin C (SapC) protein, or functional variant thereof; a cell penetrating peptide (e.g., a ApoEII peptide, a TAT peptide, and/or a ApoB peptide) or functional variant thereof; or a lysosomal targeting signal or functional variant thereof.

[0905] In some embodiments, the viral genome comprises a payload region further encoding a prosaposin (PSAP) protein or a saposin C (SapC) protein or functional variant thereof, e.g., as described herein, e.g., in Table 4 or 16.

TABLE 4
Exemplary PSAP and Saposin Sequences

| SEQ ID | | | |
|---|---|---|---|
| NO: | Type | Species | Description |
| 1750 | Protein | Homo sapiens | Prosaposin isoform A preprotein, NP_002769.1 |
| 1751 | DNA | Homo sapiens | PSAP transcript variant 1, NM_002778.4 |
| 1752 | Protein | Homo sapiens | Prosaposin isoform B preprotein, NP_001035930.1 |
| 1753 | DNA | Homo sapiens | PSAP transcript variant 2, NM_001042465.3 |
| 1754 | Protein | Homo sapiens | Prosaposin isoform C preprotein, NP_001035931.1 |
| 1755 | DNA | Homo sapiens | PSAP transcript variant 3, NM_001042466.3 |
| 1756 | Protein | Homo sapiens | hSapA, amino acids 60 to 140 of SEQ ID NO: 1750: |
| | | | SLPCDICKDVVTAAGDMLKDNATEEEILVYLEKTCDWLPKPNMSASCK |
| | | | EIVDSYLPVILDIIKGEMSRPGEVCSALNLCES |
| 1757 | Protein | Homo sapiens | hSapB, amino acids 195 to 275 of SEQ ID NO: 1750: |
| | | | GDVCQDCIQMVTDIQTAVRTNSTFVQALVEHVKEECDRLGPGMADICK |
| | | | NYISQYSEIAIQMMMHMQPKEICALVGFCDEVK |
| 1758 | Protein | Homo sapiens | hSapC, amino acids 311 to 390 of SEQ ID NO: 1750: |
| | | | SDVYCEVCEFLVKEVTKLIDNNKTEKEILDAFDKMCSKLPKSLSEECQ |
| | | | EVVDTYGSSILSILLEEVSPELVCSMLHLCSG |
| 1784 | Protein | Homo sapiens | hSapD, amino acids 405 to 486 of SEQ ID NO 1750: |
| | | | DGGFCEVCKKLVGYLDRNLEKNSTKQEILAALEKGCSFLPDPYQKQCDQ |
| | | | FVAEYEPVLIEILVEVMDPSFVCLKIGACPSAH |
| 1856 | DNA | Homo sapiens | Signal Sequence |
| | | | atgtacgccctcttcctcctggccagcctcctgggcgcggctctagcc |
| 1857 | Protein | Homo sapiens | Signal Sequence |
| | | | MYALFLLASLLGAALA |

TABLE 16
Exemplary Enhancement Elements

| | | |
|---|---|---|
| | | SEQ |
| | | ID |
| Description | Sequence | NO: |

PSAP or Saposin

| | | |
|---|---|---|
| PSAP | atgtacgccctcttcctcctggccagcctcctgggcgcggctctagc | 1858 |
| (signal sequence | cggcccggtccttggactgaaagaatgcaccaggggctcggcagtgt | |
| underlined)-nt | ggtgccagaatgtgaagacggcgtccgactgcggggcagtgaagcac | |
| | tgcctgcagaccgtttggaacaagccaacagtgaaatcccttccctg | |
| | cgacatatgcaaagacgttgtcaccgcagctggtgatatgctgaagg | |
| | acaatgccactgaggaggagatccttgtttacttggagaagacctgt | |
| | gactggcttccgaaaccgaacatgtctgcttcatgcaaggagatagt | |
| | ggactcctacctccctgtcatcctggacatcattaaaggagaaatga | |
| | gccgtcctggggaggtgtgctctgctctcaacctctgcgagtctctc | |
| | cagaagcacctagcagagctgaatcaccagaagcagctggagtccaa | |
| | taagatcccagagctggacatgactgaggtggtggcccccttcatgg | |
| | ccaacatccctctcctcctctaccctcaggacggcccccgcagcaag | |
| | ccccagccaaaggataatggggacgtttgccaggactgcattcagat | |
| | ggtgactgacatccagactgctgtacggaccaactccacctttgtcc | |
| | aggccttggtggaacatgtcaaggaggagtgtgaccgcctgggccct | |
| | ggcatggccgacatatgcaagaactatatcagccagtattctgaaat | |
| | tgctatccagatgatgatgcacatgcaacccaaggagatctgtgcgc | |
| | tggttgggttctgtgatgaggtgaaagagatgcccatgcagactctg | |
| | gtccccgccaaagtggcctccaagaatgtcatccctgccctggaact | |
| | ggtggagcccattaagaagcacgaggtcccagcaaagtctgatgttt | |
| | actgtgaggtgtgtgaattcctggtgaaggaggtgaccaagctgatt | |
| | gacaacaacaagactgagaaagaaatactcgacgcttttgacaaaat | |
| | gtgctcgaagctgccgaagtccctgtcggaagagtgccaggaggtgg | |
| | tggacacgtacggcagctccatcctgtccatcctgctggaggaggtc | |
| | agccctgagctggtgtgcagcatgctgcacctctgctctggcacgcg | |
| | gctgcctgcactgaccgttcacgtgactcagccaaaggacggtggct | |
| | tctgcgaagtgtgcaagaagctggtgggttatttggatcgcaacctg | |
| | gagaaaaacagcaccaagcaggagatcctggctgctcttgagaaagg | |
| | ctgcagcttcctgccagacccttaccagaagcagtgtgatcagtttg | |
| | tggcagagtacgagcccgtgctgatcgagatcctggtggaggtgatg | |
| | gatccttccttcgtgtgcttgaaaattggagcctgcccctcggccca | |
| | taagcccttgttgggaactgagaagtgtatatggggcccaagctact | |
| | ggtgccagaacacagagacagcagcccagtgcaatgctgtcgagcat | |
| | tgcaaacgccatgtgtggaactag | |
| PSAP | ggcccggtccttggactgaaagaatgcaccaggggctcggcagtgtg | 1859 |
| (no signal | gtgccagaatgtgaagacggcgtccgactgcggggcagtgaagcact | |
| sequence)-nt | gcctgcagaccgtttggaacaagccaacagtgaaatcccttccctgc | |
| | gacatatgcaaagacgttgtcaccgcagctggtgatatgctgaagga | |
| | caatgccactgaggaggagatccttgtttacttggagaagacctgtg | |
| | actggcttccgaaaccgaacatgtctgcttcatgcaaggagatagtg | |
| | gactcctacctccctgtcatcctggacatcattaaaggagaaatgag | |
| | ccgtcctggggaggtgtgctctgctctcaacctctgcgagtctctcc | |
| | agaagcacctagcagagctgaatcaccagaagcagctggagtccaat | |
| | aagatcccagagctggacatgactgaggtggtggcccccttcatggc | |
| | caacatccctctcctcctctaccctcaggacggcccccgcagcaagc | |
| | cccagccaaaggataatggggacgtttgccaggactgcattcagatg | |
| | gtgactgacatccagactgctgtacggaccaactccacctttgtcca | |
| | ggccttggtggaacatgtcaaggaggagtgtgaccgcctgggccctg | |
| | gcatggccgacatatgcaagaactatatcagccagtattctgaaatt | |
| | gctatccagatgatgatgcacatgcaacccaaggagatctgtgcgct | |
| | ggttgggttctgtgatgaggtgaaagagatgcccatgcagactctgg | |
| | tccccgccaaagtggcctccaagaatgtcatccctgccctggaactg | |
| | gtggagcccattaagaagcacgaggtcccagcaaagtctgatgttta | |
| | ctgtgaggtgtgtgaattcctggtgaaggaggtgaccaagctgattg | |
| | acaacaacaagactgagaaagaaatactcgacgcttttgacaaaatg | |
| | tgctcgaagctgccgaagtccctgtcggaagagtgccaggaggtggt | |
| | ggacacgtacggcagctccatcctgtccatcctgctggaggaggtca | |
| | gccctgagctggtgtgcagcatgctgcacctctgctctggcacgcgg | |
| | ctgcctgcactgaccgttcacgtgactcagccaaaggacggtggctt | |
| | ctgcgaagtgtgcaagaagctggtgggttatttggatcgcaacctgg | |
| | agaaaaacagcaccaagcaggagatcctggctgctcttgagaaaggc | |
| | tgcagcttcctgccagacccttaccagaagcagtgtgatcagtttgt | |
| | ggcagagtacgagcccgtgctgatcgagatcctggtggaggtgatgg | |
| | atccttccttcgtgtgcttgaaaattggagcctgcccctcggcccat | |
| | aagcccttgttgggaactgagaagtgtatatggggcccaagctactg | |
| | gtgccagaacacagagacagcagcccagtgcaatgctgtcgagcatt | |
| | gcaaacgccatgtgtggaactag | |
| PSAP | MYALFLLASLLGAALAGPVLGLKECTRGSAVWCQNVKTASDCGAVKH | 1750 |
| (signal sequence | CLQTVWNKPTVKSLPCDICKDVVTAAGDMLKDNATEEEILVYLEKTC | |
| underlined)-aa | DWLPKPNMSASCKEIVDSYLPVILDIIKGEMSRPGEVCSALNLCESL | |
| | QKHLAELNHQKQLESNKIPELDMTEVVAPFMANIPLLLYPQDGPRSK | |
| | PQPKDNGDVCQDCIQMVTDIQTAVRTNSTFVQALVEHVKEECDRLGP | |
| | GMADICKNYISQYSEIAIQMMMHMQPKEICALVGFCDEVKEMPMQTL | |
| | VPAKVASKNVIPALELVEPIKKHEVPAKSDVYCEVCEFLVKEVTKLI | |
| | DNNKTEKEILDAFDKMCSKLPKSLSEECQEVVDTYGSSILSILLEEV | |
| | SPELVCSMLHLCSGTRLPALTVHVTQPKDGGFCEVCKKLVGYLDRNL | |
| | EKNSTKQEILAALEKGCSFLPDPYQKQCDQFVAEYEPVLIEILVEVM | |
| | DPSFVCLKIGACPSAHKPLLGTEKCIWGPSYWCONTETAAQCNAVEH | |
| | CKRHVWN | |
| PSAP | GPVLGLKECTRGSAVWCQNVKTASDCGAVKHCLQTVWNKPTVKSLPC | 1785 |
| (no signal | DICKDVVTAAGDMLKDNATEEEILVYLEKTCDWLPKPNMSASCKEIV | |
| sequence) | DSYLPVILDIIKGEMSRPGEVCSALNLCESLQKHLAELNHQKQLESN | |
| | KIPELDMTEVVAPFMANIPLLLYPQDGPRSKPQPKDNGDVCQDCIQM | |
| | VTDIQTAVRTNSTFVQALVEHVKEECDRLGPGMADICKNYISQYSEI | |
| | AIQMMMHMQPKEICALVGFCDEVKEMPMQTLVPAKVASKNVIPALEL | |
| | VEPIKKHEVPAKSDVYCEVCEFLVKEVTKLIDNNKTEKEILDAFDKM | |
| | CSKLPKSLSEECQEVVDTYGSSILSILLEEVSPELVCSMLHLCSGTR | |
| | LPALTVHVTQPKDGGFCEVCKKLVGYLDRNLEKNSTKQEILAALEKG | |
| | CSFLPDPYQKQCDQFVAEYEPVLIEILVEVMDPSFVCLKIGACPSAH | |
| | KPLLGTEKCIWGPSYWCQNTETAAQCNAVEHCKRHVWN | |
| SAPC | atgtacgccctcttcctcctggccagcctcctgggcgcggctctagc | 1786 |
| (signal sequence | cgtgaaagagatgcccatgcagactctggtccccgccaaagtggcct | |
| underlined)-nt | ccaagaatgtcatccctgccctggaactggtggagcccattaagaag | |
| | cacgaggtcccagcaaagtctgatgtttactgtgaggtgtgtgaatt | |
| | cctggtgaaggaggtgaccaagctgattgacaacaacaagactgaga | |
| | aagaaatactcgacgcttttgacaaaatgtgctcgaagctgccgaag | |
| | tccctgtcggaagagtgccaggaggtggtggacacgtacggcagctc | |
| | catcctgtccatcctgctggaggaggtcagccctgagctggtgtgca | |
| | gcatgctgcacctctgctctggc | |
| SAPC | gtgaaagagatgcccatgcagactctggtccccgccaaagtggcctc | 1787 |
| (no signal | caagaatgtcatccctgccctggaactggtggagcccattaagaagc | |
| sequence)-nt | acgaggtcccagcaaagtctgatgtttactgtgaggtgtgtgaattc | |
| | ctggtgaaggaggtgaccaagctgattgacaacaacaagactgagaa | |
| | agaaatactcgacgcttttgacaaaatgtgctcgaagctgccgaagt | |
| | ccctgtcggaagagtgccaggaggtggtggacacgtacggcagctcc | |
| | atcctgtccatcctgctggaggaggtcagccctgagctggtgtgcag | |
| | catgctgcacctctgctctggc | |
| SAPC | MYALFLLASLLGAALAVKEMPMQTLVPAKVASKNVIPALELVEPIKK | 1788 |
| (signal sequence | HEVPAKSDVYCEVCEFLVKEVTKLIDNNKTEKEILDAFDKMCSKLPK | |
| underlined)-aa | SLSEECQEVVDTYGSSILSILLEEVSPELVCSMLHLCSG | |
| SAPC | VKEMPMQTLVPAKVASKNVIPALELVEPIKKHEVPAKSDVYCEVCEF | 1789 |
| (no signal | LVKEVTKLIDNNKTEKEILDAFDKMCSKLPKSLSEECQEVVDTYGSS | |
| sequence)-aa | ILSILLEEVSPELVCSMLHLCSG | |
| SAPCv2 | atgtacgccctcttcctcctggccagcctcctgggcgcggctctagc | 1790 |
| (signal sequence | ctctgatgtttactgtgaggtgtgtgaattcctggtgaaggaggtga | |
| underlined)-nt | ccaagctgattgacaacaacaagactgagaaagaaatactcgacgct | |
| | tttgacaaaatgtgctcgaagctgccgaagtccctgtcggaagagtg | |
| | ccaggaggtggtggacacgtacggcagctccatcctgtccatcctgc | |
| | tggaggaggtcagccctgagctggtgtgcagcatgctgcacctctgc | |
| | tctggc | |
| SAPCv2 | tctgatgtttactgtgaggtgtgtgaattcctggtgaaggaggtgac | 1791 |
| (no signal | caagctgattgacaacaacaagactgagaaagaaatactcgacgctt | |
| sequence)-nt | ttgacaaaatgtgctcgaagctgccgaagtccctgtcggaagagtgc | |
| | caggaggtggtggacacgtacggcagctccatcctgtccatcctgct | |
| | ggaggaggtcagccctgagctggtgtgcagcatgctgcacctctgct | |
| | ctggc | |
| SAPCv2 | MYALFLLASLLGAALASDVYCEVCEFLVKEVTKLIDNNKTEKEILDA | 1792 |
| (signal sequence | FDKMCSKLPKSLSEECQEVVDTYGSSILSILLEEVSPELVCSMLHLC | |
| underlined)-aa | SG | |
| SAPCv2 | SDVYCEVCEFLVKEVTKLIDNNKTEKEILDAFDKMCSKLPKSLSEEC | 1758 |
| (no signal | QEVVDTYGSSILSILLEEVSPELVCSMLHLCSG | |
| sequence) -aa | | |

Cell Penetrating
Peptides

| | | |
|---|---|---|
| TAT - nt | tatggcaggaaaaagcggaggcaaaggcgccgccccccccag | 1793 |
| TAT - aa | YGRKKRRQRRRPPQ | 1794 |
| ApoB - nt | tccgtaatcgacgccttacagtataagctggagggaaccaccagatt | 1795 |
| | gacaaggaaacgagggcttaagcttgctactgcactatccctgagca | |
| | ataaattt | |
| ApoB - aa | SVIDALQYKLEGTTRLTRKRGLKLATALSLSNKF | 1796 |
| ApoEII - nt | ctacggaagctgcggaagcggctactgctgcggaaacttcggaaacg | 1797 |
| | gctactg | |
| ApoEII - aa | LRKLRKRLLLRKLRKRLL | 1798 |

Lysosomal Targeting
Sequence (LTS)

| | | |
|---|---|---|
| LTS1 - nt | aagtttgaaagacag | 1799 |
| LTS1 - aa | KFERQ | 1800 |
| LTS2 - nt | atgaaggagaccgctgctgcaaagttcgagagacagcatatggatag | 1801 |
| | ctccacaagcgccgca | |
| LTS2 - aa | MKETAAAKFERQHMDSSTSAA | 1802 |
| LTS3 - nt | cagaaaatcctggat | 1803 |
| LTS3 - aa | QKILD | 1804 |
| LTS4 - nt | cagagattcttcgag | 1805 |
| LTS4 - aa | QRFFE | 1806 |
| LTS5 - nt | aagtttgaaagacagcagaaaatcctggatcagagattcttcgag | 1807 |
| LTS5 - aa | KFERQQKILDORFFE | 1808 |

[0906] In some embodiments, the viral genome comprises a payload region encoding a SapC protein. The encoded SapC may be derived from any species, such as, but not limited to human, non-human primate, or rodent. SapC protein is thought to coordinate GCase activity of GBA by locally altering lipid membranes, exposing glucosylceramide molecules for hydrolysis (see Alattia, Jean-René, et al. “Molecular imaging of membrane interfaces reveals mode of β-glucosidase activation by saposin C.” Proceedings of the National Academy of Sciences 104.44 (2007): 17394-17399, the contents of which are incorporated by reference herein in their entirety).

[0907] In some embodiments, the viral genome comprises a payload region encoding a human (Homo sapiens) SapC, or a variant thereof.

[0908] Various embodiments of the disclosure herein provide an adeno-associated viral (AAV) particle comprising a viral genome, the viral genome comprising at least one inverted terminal repeat region and a nucleic acid sequence encoding a polypeptide having at least 90% sequence identity to a human SapC (hSapC) sequence, or a fragment thereof, as provided in Table 4. In some embodiments, the AAV viral genome comprises at least one inverted terminal repeat region and a nucleic acid sequence encoding a polypeptide having at least 95% sequence identity to a Saposin sequence, or a fragment thereof, as provided in Table 4. In some embodiments, the AAV viral genome comprises at least one inverted terminal repeat region and a nucleic acid sequence encoding a polypeptide having at least 98% sequence identity to a Saposin sequence, or a fragment thereof, as provided in Table 4. In some embodiments, the AAV viral genome comprises at least one inverted terminal repeat region and a nucleic acid sequence encoding a polypeptide having at least 99% sequence identity to a Saposin sequence, or a fragment thereof, as provided in Table 4. In some embodiments, the AAV viral genome comprises at least one inverted terminal repeat region and a nucleic acid sequence encoding a Saposin sequence, or a fragment thereof, as provided in Table 4.

[0909] In some embodiments, the Saposin polypeptide is derived from a Saposin or PSAP sequence of a non-human primate, such as the cynomolgus monkey, Macaca fascicularis (cynoPSAP or cPSAP). Certain embodiments provide the Saposin polypeptide as a humanized version of a Macaca fascicularis (HcynoSap) sequence.

[0910] In some embodiments, the viral genome comprises a payload region encoding a cynomolgus or crab-eating (long-tailed) macaque (Macaca fascicularis) PSAP or Saposin, or a variant thereof.

[0911] In some embodiments, the viral genome comprises a payload region encoding a rhesus macaque (Macaca mulatta) PSAP or Saposin, or a variant thereof.

[0912] In some embodiments, the viral genome comprises a payload region encoding a murine (Mus musculus) PSAP or Saposin, or variant thereof.

[0913] In some embodiments, the PSAP or Saposin polypeptide may comprise an amino acid sequence with 50%, 51%, 52%, 53%, 54%, 55%, 56%, 57%, 58%, 59%, 60%, 61%, 62%, 63%, 64%, 65%, 66%, 67%, 68%, 69%, 70%, 71%, 72%, 73%, 74%, 75%, 76%, 77%, 78%, 79%, 80%, 81%, 82%, 83%, 84%, 85%, 86%, 87%, 88%, 89%, 90%, 91%, 92%, 93%, 94%, 95%, 96%, 97%, 98%, 99%, or 100% identity to any of the those described above and provided in Table 4.

[0914] In some embodiments, the PSAP or Saposin polypeptide may be encoded by a nucleic acid sequence with 50%, 51%, 52%, 53%, 54%, 55%, 56%, 57%, 58%, 59%, 60%, 61%, 62%, 63%, 64%, 65%, 66%, 67%, 68%, 69%, 70%, 71%, 72%, 73%, 74%, 75%, 76%, 77%, 78%, 79%, 80%, 81%, 82%, 83%, 84%, 85%, 86%, 87%, 88%, 89%, 90%, 91%, 92%, 93%, 94%, 95%, 96%, 97%, 98%, 99%, or 100% identity to any of the those described above and provided in Table 4.

[0915] In some embodiments, the viral genome comprises a payload region further encoding a PD-associated gene the lack of expression of which causes or leads to or promotes the development of PD. Such PD-associated gene incudes GCase/GBA1, GBA2, prosapsin, LIMP2/SCARB2 (e.g., the gene product of SCARB2 gene), progranulin, GALC, CTSB, SMPD1, GCH1, RAB7, VPS35, IL-34, TREM2, TMEM106B, a combination of any of the foregoing, or a functional fragment thereof.

[0916] Thus in some embodiments, the viral genome comprises a payload region encoding a LIMP2/SCARB2, a membrane protein that regulates lysosomal and endosomal transport within a cell. In some embodiments, the SCARB2 gene encodes a peptide that is represented by NCBI Reference Sequence NP_005497.1 (incorporated herein by reference). In some embodiments the isolated nucleic acid comprises a SCARB2-encoding sequence that has been codon optimized.

[0917] In some embodiments, the viral genome comprises a payload region encoding a GBA2 protein (e.g., the gene product of GBA2 gene). In some embodiments, the GBA2-encoding sequence has been codon optimized (e.g., codon optimized for expression in mammalian cells, for example human cells). In some embodiments, the GBA2-encoding sequence encodes a protein comprising an amino acid sequence as set forth in NCBI Reference Sequence NP_065995.1 (incorporated herein by reference).

[0918] In some embodiments, the viral genome comprises a payload region encoding a GALC protein (e.g., the gene product of GALC gene). In some embodiments, the GALC-encoding sequence has been codon optimized (e.g., codon optimized for expression in mammalian cells, for example human cells). In some embodiments, the GALC-encoding sequence encodes a protein comprising an amino acid sequence as set forth in NCBI Reference Sequence NP_000144.2 (incorporated herein by reference).

[0919] In some embodiments, the viral genome comprises a payload region encoding a CTSB protein (e.g., the gene product of CTSB gene). In some embodiments, the CTSB-encoding sequence has been codon optimized (e.g., codon optimized for expression in mammalian cells, for example human cells). In some embodiments, the CTSB-encoding sequence encodes a protein comprising an amino acid sequence as set forth in NCBI Reference Sequence NP_001899.1 (incorporated by reference).

[0920] In some embodiments, the viral genome comprises a payload region encoding a SMPD1 protein (e.g., the gene product of SMPD1 gene). In some embodiments, the SMPD1-encoding sequence has been codon optimized (e.g., codon optimized for expression in mammalian cells, for example human cells). In some embodiments, the SMPD1-encoding sequence encodes a protein comprising an amino acid sequence as set forth in NCBI Reference Sequence NP_000534.3 (incorporated herein by reference).

[0921] In some embodiments, the viral genome comprises a payload region encoding a GCH1 protein (e.g., the gene product of GCH1 gene). In some embodiments, the GCH1-encoding sequence has been codon optimized (e.g., codon optimized for expression in mammalian cells, for example human cells). In some embodiments, the GCH1-encoding sequence encodes a protein comprising an amino acid sequence as set forth in NCBI Reference Sequence NP_000534.3 (incorporated by reference).

[0922] In some embodiments, the viral genome comprises a payload region encoding a RAB7L protein (e.g., the gene product of RAB7L gene). In some embodiments, the RAB7L-encoding sequence has been codon optimized (e.g., codon optimized for expression in mammalian cells, for example human cells). In some embodiments, the RAB7L encodes a protein comprising an amino acid sequence as set forth in NCBI Reference Sequence NP_003920.1 (incorporated by reference).

[0923] In some embodiments, the viral genome comprises a payload region encoding a VPS35 protein (e.g., the gene product of VPS35 gene). In some embodiments, the VPS35-encoding sequence has been codon optimized (e.g., codon optimized for expression in mammalian cells, for example human cells). In some embodiments, the VPS35 encodes a protein comprising an amino acid sequence as set forth in NCBI Reference Sequence NP_060676.2 (incorporated by reference).

[0924] In some embodiments, the viral genome comprises a payload region encoding an IL-34 protein (e.g., the gene product of IL34 gene). In some embodiments, the IL-34-encoding sequence has been codon optimized (e.g., codon optimized for expression in mammalian cells, for example human cells). In some embodiments, the IL-34-encoding sequence encodes a protein comprising an amino acid sequence as set forth in NCBI Reference Sequence NP_689669.2 (incorporated by reference).

[0925] In some embodiments, the viral genome comprises a payload region encoding a TREM2 protein (e.g., the gene product of TREM gene). In some embodiments, the TREM2-encoding sequence has been codon optimized (e.g., codon optimized for expression in mammalian cells, for example human cells). In some embodiments, the TREM2-encoding sequence encodes a protein comprising an amino acid sequence as set forth in NCBI Reference Sequence NP_061838.1 (incorporated by reference).

[0926] In some embodiments, the viral genome comprises a payload region encoding a TMEM106B protein (e.g., the gene product of TMEM106B gene). In some embodiments, the TMEM106B-encoding sequence has been codon optimized (e.g., codon optimized for expression in mammalian cells, for example human cells). In some embodiments, the TMEM106B-encoding sequence encodes a protein comprising an amino acid sequence as set forth in NCBI Reference Sequence NP_060844.2 (incorporated by reference).

[0927] In some embodiments, the viral genome comprises a payload region encoding a progranulin (e.g., the gene product of PGRN gene). In some embodiments, the progranulin-encoding sequence has been codon optimized (e.g., codon optimized for expression in mammalian cells, for example human cells). In some embodiments, the nucleic acid sequence encoding the progranulin (PRGN) encodes a protein comprising an amino acid sequence as set forth in NCBI Reference Sequence NP_002078.1 (incorporated by reference).

[0928] In certain embodiments, a functional fragment of any of the above protein such as GCase/GBA, GBA2, LIMP2/SCARB2, progranulin, GALC, CTSB, SMPD1, GCH1, RAB7, VPS35, IL-34, TREM2, TMEM106B, and prosapsin (such as SapA-SapD) may comprise about 50%, about 60%, about 70%, about 80% about 90% or about 99% of a protein encoded by the respective wt genes or gene segments (such as coding sequence for SapA-SapD). In some embodiments, a functional fragment of a wt sequence comprises between 50% and 99.9% (e.g., any value between 50% and 99.9%) of a protein encoded by a wt sequence.

### Exemplary GCase/SapC Payloads

[0929] In some embodiments, the viral genome comprises a payload region encoding a GCase protein and a SapC protein (a GCase/SapC polypeptide). The encoded GCase/SapC polypeptide may be derived from GCase and SapC protein sequences of any species, such as, but not limited to human, non-human primate, or rodent.

[0930] Various embodiments of the disclosure herein provide an adeno-associated viral (AAV) particle comprising a viral genome, the viral genome comprising at least one inverted terminal repeat region and a nucleic acid sequence encoding a GCase/SapC polypeptide having a region of at least 90% sequence identity to a human GCase sequence provided in Table 3 or a fragment or variant thereof and a region of at least 90% sequence identity to a human SapC sequence provided in Table 4 or 16, or a fragment or variant thereof.

[0931] In some embodiments, the GCase/SapC polypeptide may comprise a GCase region having 50%, 51%, 52%, 53%, 54%, 55%, 56%, 57%, 58%, 59%, 60%, 61%, 62%, 63%, 64%, 65%, 66%, 67%, 68%, 69%, 70%, 71%, 72%, 73%, 74%, 75%, 76%, 77%, 78%, 79%, 80%, 81%, 82%, 83%, 84%, 85%, 86%, 87%, 88%, 89%, 90%, 91%, 92%, 93%, 94%, 95%, 96%, 97%, 98%, 99%, or 100% sequence identity to any of the those in Table 3 or 15.

[0932] In some embodiments, the GCase/SapC polypeptide may comprise a SapC region having 50%, 51%, 52%, 53%, 54%, 55%, 56%, 57%, 58%, 59%, 60%, 61%, 62%, 63%, 64%, 65%, 66%, 67%, 68%, 69%, 70%, 71%, 72%, 73%, 74%, 75%, 76%, 77%, 78%, 79%, 80%, 81%, 82%, 83%, 84%, 85%, 86%, 87%, 88%, 89%, 90%, 91%, 92%, 93%, 94%, 95%, 96%, 97%, 98%, 99%, or 100% sequence identity to any of the those in Table 4 or 16.

[0933] In some embodiments, the GCase/SapC polypeptide may be encoded by a nucleic acid sequence having a GCase region with 50%, 51%, 52%, 53%, 54%, 55%, 56%, 57%, 58%, 59%, 60%, 61%, 62%, 63%, 64%, 65%, 66%, 67%, 68%, 69%, 70%, 71%, 72%, 73%, 74%, 75%, 76%, 77%, 78%, 79%, 80%, 81%, 82%, 83%, 84%, 85%, 86%, 87%, 88%, 89%, 90%, 91%, 92%, 93%, 94%, 95%, 96%, 97%, 98%, 99%, or 100% sequence identity to any of the those described in Table 3 or 15.

[0934] In some embodiments, the GCase/SapC polypeptide may be encoded by a nucleic acid sequence having a SapC region with 50%, 51%, 52%, 53%, 54%, 55%, 56%, 57%, 58%, 59%, 60%, 61%, 62%, 63%, 64%, 65%, 66%, 67%, 68%, 69%, 70%, 71%, 72%, 73%, 74%, 75%, 76%, 77%, 78%, 79%, 80%, 81%, 82%, 83%, 84%, 85%, 86%, 87%, 88%, 89%, 90%, 91%, 92%, 93%, 94%, 95%, 96%, 97%, 98%, 99%, or 100% sequence identity to any of the those described in Table 4 or 16.

[0935] Viral genomes may be engineered with one or more spacer or linker regions to separate coding or non-coding regions. In some embodiments, the payload region of the AAV particle may optionally encode one or more linker sequences. In some cases, the linker may be a peptide linker that may be used to connect the polypeptides encoded by the payload region (i.e., GCase polypeptides and SapC polypeptides). Some peptide linkers may be cleaved after expression to separate GCase and SapC polypeptides, allowing expression of separate functional polypeptides. Linker cleavage may be enzymatic. In some cases, linkers comprise an enzymatic cleavage site to facilitate intracellular or extracellular cleavage. Some payload regions encode linkers that interrupt polypeptide synthesis during translation of the linker sequence from an mRNA transcript. Such linkers may facilitate the translation of separate protein domains (e.g., GCase and SapC domains) from a single transcript. In some cases, two or more linkers are encoded by a payload region of the viral genome. Non-limiting examples of linkers that may be encoded by the payload region of an AAV particle viral genome are given in Table 2.

[0936] In some embodiments, GCase and SapC polypeptides are delivered separately in independent AAV vectors.

[0937] In certain embodiments, viral genomes for expressing Gcase and/or Saposin may comprise a sequence as described in Table 5.

[0938] In some embodiments, the AAV viral genomes described herein comprise an enhancement elements such as a lysosomal targeting peptide sequence (LTS), a cell penetrating peptide (CPP), or both. For example, in some embodiments, a payload may have a sequence encoding a lysosomal targeting peptide. The sequence encoding the lysosomal targeting peptide can be a sequence derived from GCase. In some cases, it is a LIMP-2 binding domain, or a variant thereof, which aides in the intracellular trafficking of a molecule to lysosomes, which is responsible for the intracellular trafficking of GCase to lysosomes via LIMP-2 (Liou, Benjamin, et al. Journal of Biological Chemistry 289.43 (2014): 30063-30074, the contents of which are incorporated herein by reference in their entirety).

### Exemplary GBA AAV Viral Genome Sequence Regions and ITR to ITR Sequences

[0939] In some embodiments, a viral genome, e.g., an AAV viral genome or vector genome, described herein, comprises a promoter operably linked to a transgene encoding a GBA protein. In some embodiments, the viral genome further comprises an inverted terminal repeat region, an enhancer, an intron, a miR binding site, a polyA region, or a combination thereof. Exemplary sequence regions within ITR to ITR sequences for viral genomes according to the description are provided in Table 5. In some embodiments, the viral genome encoding a GBA protein encodes comprises a viral genome sequence or nucleotide sequence encoding a component thereof provided in WO 2022/026409 (e.g., a viral genome sequence or component thereof provided in any one of Tables 5, 18-21, 29-32), the contents of which are hereby incorporated by reference in their entirety, or a sequence at least 80% (e.g., at least 85%, 90%, 95%, 96%, 97%, 98%, or 99%) identical thereto.

TABLE 5
Exemplary Viral Genome sequence regions in ITR to ITR constructs

| | | SEQ |
|---|---|---|
| | | ID |
| Description | Sequence | NO: |
| ITR (130 nt) | ctgcgcgctcgctcgctcactgaggccgcccgggcaaagcccgggcgtcgggcg | 1829 |
| | acctttggtcgcccggcctcagtgagcgagcgagcgcgcagagagggagtggcc | |
| | aactccatcactaggggttcct | |
| ITR(130 nt) | aggaacccctagtgatggagttggccactccctctctgcgcgctcgctcgctca | 1830 |
| | ctgaggccgggcgaccaaaggtcgcccgacgcccgggctttgcccgggcggcct | |
| | cagtgagcgagcgagcgcgcag | |
| ITR variant A | TATTAGATCTGATGGCCGC | 1860 |
| ITR variant B | CTCCATCACTAGGGGTTCCT | 1861 |
| ITR variant B | AGGAACCCCTAGTGATGGAGTTGGCCACTCCCTCTCTGCGCGCTCGCTCGCTCA | 1862 |
| | CTGAGGCCGGGCGACCAAAGGTCGCCCGACGCCCGGGCTTTGCCCGGGCGGCCT | |
| | CAGTGAGCGAGCGAGCGCGCAGAGAGGGAGTGGCCAA | |
| ITR variant C | TATTAGATCTGATGGCCGCG | 1863 |
| ITR variant D | TCCATCACTAGGGGTTCCTG | 1864 |
| CMVie | GACATTGATTATTGACTAGTTATTAATAGTAATCAATTACGGGGTCATTAGTTC | 1831 |
| enhancer | ATAGCCCATATATGGAGTTCCGCGTTACATAACTTACGGTAAATGGCCCGCCTG | |
| | GCTGACCGCCCAACGACCCCCGCCCATTGACGTCAATAATGACGTATGTTCCCA | |
| | TAGTAACGCCAATAGGGACTTTCCATTGACGTCAATGGGTGGAGTATTTACGGT | |
| | AAACTGCCCACTTGGCAGTACATCAAGTGTATCATATGCCAAGTACGCCCCCTA | |
| | TTGACGTCAATGACGGTAAATGGCCCGCCTGGCATTATGCCCAGTACATGACCT | |
| | TATGGGACTTTCCTACTTGGCAGTACATCTACGTATTAGTCATCGCTATTACCA | |
| | TG | |
| CMV | gtgatgcggttttggcagtacatcaatgggcgtggatagcggtttgactcacgg | 1832 |
| promoter | ggatttccaagtctccaccccattgacgtcaatgggagtttgttttggcaccaa | |
| | aatcaacgggactttccaaaatgtcgtaacaactccgccccattgacgcaaatg | |
| | ggcggtaggcgtgtacggtgggaggtctatataagcagagctc | |
| CMV | gacattgattattgactagttattaatagtaatcaattacggggtcattagttc | 1833 |
| promoter | atagcccatatatggagttccgcgttacataacttacggtaaatggcccgcctg | |
| region (CMV | gctgaccgcccaacgacccccgcccattgacgtcaataatgacgtatgttccca | |
| enhancer and | tagtaacgccaatagggactttccattgacgtcaatgggtggagtatttacggt | |
| promoter) | aaactgcccacttggcagtacatcaagtgtatcatatgccaagtacgcccccta | |
| | ttgacgtcaatgacggtaaatggcccgcctggcattatgcccagtacatgacct | |
| | tatgggactttcctacttggcagtacatctacgtattagtcatcgctattacca | |
| | tggtgatgcggttttggcagtacatcaatgggcgtggatagcggtttgactcac | |
| | ggggatttccaagtctccaccccattgacgtcaatgggagtttgttttggcacc | |
| | aaaatcaacgggactttccaaaatgtcgtaacaactccgccccattgacgcaaa | |
| | tgggcggtaggcgtgtacggtgggaggtctatataagcagagctc | |
| CB promoter | ccacgttctgcttcactctccccatctcccccccctccccacccccaattttgt | 1834 |
| | atttatttattttttaattattttgtgcagcgatgggggcggggggggggggcg | |
| | cgcgccaggcggggcggggcggggcgaggggcggggcggggcgaggcggagagg | |
| | tgcggcggcagccaatcagagcggcgcgctccgaaagtttccttttatggcgag | |
| | gcggcggcggcggcggccctataaaaagcgaagcgcgcggcggg | |
| CAG | ctagttattaatagtaatcaattacggggtcattagttcatagcccatatatgg | 1835 |
| promoter | agttccgcgttacataacttacggtaaatggcccgcctggctgaccgcccaacg | |
| | acccccgcccattgacgtcaataatgacgtatgttcccatagtaacgccaatag | |
| | ggactttccattgacgtcaatgggtggagtatttacggtaaactgcccacttgg | |
| | cagtacatcaagtgtatcatatgccaagtacgccccctattgacgtcaatgacg | |
| | gtaaatggcccgcctggcattatgcccagtacatgaccttatgggactttccta | |
| | cttggcagtacatctacgtattagtcatcgctattaccatggtcgaggtgagcc | |
| | ccacgttctgcttcactctccccatctcccccccctccccacccccaattttgt | |
| | atttatttattttttaattattttgtgcagcgatgggggcgggggggggggggg | |
| | ggcgcgcgccaggcggggcggggcggggcgaggggcggggcggggcgaggcgga | |
| | gaggtgcggcggcagccaatcagagcggcgcgctccgaaagtttccttttatgg | |
| | cgaggcggcggcggcggcggccctataaaaagcgaagcgcgcggcgggcgGgag | |
| | tcgctgcgcgctgccttcgccccgtgccccgctccgccgccgcctcgcgccgcc | |
| | cgccccggctctgactgaccgcgttactcccacaggtgagcgggcgggacggcc | |
| | cttctcctccgggctgtaattagcgcttggtttaatgacggcttgtttcttttc | |
| | tgtggctgcgtgaaagccttgaggggctccgggagggccctttgtgcgggggga | |
| | gcggctcggggggtgcgtgcgtgtgtgtgtgcgtggggagcgccgcgtgcggct | |
| | ccgcgctgcccggcggctgtgagcgctgcgggcgcggcgcggggctttgtgcgc | |
| | tccgcagtgtgcgcgaggggagcgcggccgggggcggtgccccgcggtgcgggg | |
| | ggggctgcgaggggaacaaaggctgcgtgcggggtgtgtgcgtgggggggtgag | |
| | cagggggtgtgggcgcgtcggtcgggctgcaaccccccctgcacccccctcccc | |
| | gagttgctgagcacggcccggcttcgggtgcggggctccgtacggggcgtggcg | |
| | cggggctcgccgtgccgggcggggggtggcggcaggtgggggtgccgggcgggg | |
| | cggggccgcctcgggccggggagggctcgggggaggggcgcggcggcccccgga | |
| | gcgccggcggctgtcgaggcgcggcgagccgcagccattgccttttatggtaat | |
| | cgtgcgagagggcgcagggacttcctttgtcccaaatctgtgcggagccgaaat | |
| | ctgggaggcgccgccgcaccccctctagcgggcgcggggcgaagcggtgcggcg | |
| | ccggcaggaaggaaatgggcggggagggccttcgtgcgtcgccgcgccgccgtc | |
| | cccttctccctctccagcctcggggctgtccgcggggggacggctgccttcggg | |
| | ggggacggggcagggcggggttcggcttctggcgtgtgaccggcggctctagag | |
| | cctctgctaaccatgttcatgccttcttctttttcctacagctcctgggcaacg | |
| | tgctggttattgtgctgtctcatcattttggcaaagaattc | |
| CBA minimal | catggtcgaggtgagccccacgttctgcttcactctccccatctcccccccctc | 1836 |
| promoter | cccacccccaattttgtatttatttattttttaattattttgtgcagcgatggg | |
| | ggcggggggggggggggggcgcgcgccaggcggggcggggcggggcgaggggcg | |
| | gggcggggcgaggcggagaggtgcggcggcagccaatcagagcggcgcgctccg | |
| | aaagtttccttttatggcgaggcggcggcggcggcggccctataaaaagcgaag | |
| | cgcgcggcgggcg | |
| Intron 1 | Ggagtcgctgcgcgctgccttcgccccgtgccccgctccgccgccgcctcgcgc | 1837 |
| | cgcccgccccggctctgactgaccgcgttactcccacaggtgagcgggcgggac | |
| | ggcccttctcctccgggctgtaattagcgcttggtttaatgacggcttgtttct | |
| | tttctgtggctgcgtgaaagccttgaggggctccgggagggccctttgtgcggg | |
| | gggagcggctcggggggtgcgtgcgtgtgtgtgtgcgtggggagcgccgcgtgc | |
| | ggctccgcgctgcccggcggctgtgagcgctgcgggcgcggcgcggggctttgt | |
| | gcgctccgcagtgtgcgcgaggggagcgcggccgggggcggtgccccgcggtgc | |
| | ggggggggctgcgaggggaacaaaggctgcgtgcggggtgtgtgcgtggggggg | |
| | tgagcagggggtgtgggcgcgtcggtcgggctgcaaccccccctgcacccccct | |
| | ccccgagttgctgagcacggcccggcttcgggtgcggggctccgtacggggcgt | |
| | ggcgcggggctcgccgtgccgggcggggggtggcggcaggtgggggtgccgggc | |
| | ggggcggggccgcctcgggccggggagggctcgggggaggggcgcggcggcccc | |
| | cggagcgccggcggctgtcgaggcgcggcgagccgcagccattgccttttatgg | |
| | taatcgtgcgagagggcgcagggacttcctttgtcccaaatctgtgcggagccg | |
| | aaatctgggaggcgccgccgcaccccctctagcgggcgcggggcgaagcggtgc | |
| | ggcgccggcaggaaggaaatgggcggggagggccttcgtgcgtcgccgcgccgc | |
| | cgtccccttctccctctccagcctcggggctgtccgcggggggacggctgcctt | |
| | cgggggggacggggcagggcggggttcggcttctggcgtgtgaccggcggctct | |
| | agagcctctgctaaccatgttcatgccttcttctttttcctaca | |
| EF-1α | gcatgcgtga | 1838 |
| promoter | | |
| variant 1 | | |
| EF-1α | gcatgcgtgaggctccggtgcccgtcagtgggcagagcgcacatcgcccacagt | 1839 |
| promoter | ccccgagaagttggggggaggggtcggcaattgaaccggtgcctagagaaggtg | |
| variant 2 | gcgcggggtaaactgggaaagtgatgtcgtgtactggctccgcctttttcccga | |
| (intron | gggtgggggagaaccgtatataagtgcagtagtcgccgtgaacgttctttttcg | |
| underlined) | caacgggtttgccgccagaacacaggtaagtgccgtgtgtggttcccgcgggcc | |
| | tggcctctttacgggttatggcccttgcgtgccttgaattacttccacctggct | |
| | gcagtacgtgattcttgatcccgagcttcgggttggaagtgggtgggagagttc | |
| | gaggccttgcgcttaaggagccccttcgcctcgtgcttgagttgaggcctggcc | |
| | tgggcgctggggccgccgcgtgcgaatctggtggcaccttcgcgcctgtctcgc | |
| | tgctttcgataagtctctagccatttaaaatttttgatgacctgctgcgacgct | |
| | ttttttctggcaagatagtcttgtaaatgcgggccaagatctgcacactggtat | |
| | ttcggtttttggggccgcgggcggcgacggggcccgtgcgtcccagcgcacatg | |
| | ttcggcgaggcggggcctgcgagcgcggccaccgagaatcggacgggggtagtc | |
| | tcaagctggccggcctgctctggtgcctggcctcgcgccgccgtgtatcgcccc | |
| | gccctgggcggcaaggctggcccggtcggcaccagttgcgtgagcggaaagatg | |
| | gccgcttcccggccctgctgcagggagctcaaaatggaggacgcggcgctcggg | |
| | agagcgggcgggtgagtcacccacacaaaggaaaagggcctttccgtcctcagc | |
| | cgtcgcttcatgtgactccacggagtaccgggcgccgtccaggcacctcgatta | |
| | gttctcgagcttttggagtacgtcgtctttaggttggggggaggggttttatgc | |
| | gatggagtttccccacactgagtgggtggagactgaagttaggccagcttggca | |
| | cttgatgtaattctccttggaatttgccctttttgagtttggatcttggttcat | |
| | tctcaagcctcagacagtggttcaaagtttttttcttccatttcaggtgtcgtg | |
| | a | |
| EF-1α | ggctccggtgcccgtcagtgggcagagcgcacatcgcccacagtccccgagaag | 1840 |
| promoter | ttggggggaggggtcggcaattgaaccggtgcctagagaaggtggcgcggggta | |
| variant 3 | aactgggaaagtgatgtcgtgtactggctccgcctttttcccgagggtggggga | |
| (intron | gaaccgtatataagtgcagtagtcgccgtgaacgttctttttcgcaacgggttt | |
| underlined) | gccgccagaacacaggtaagtgccgtgtgtggttcccgcgggcctggcctcttt | |
| | acgggttatggcccttgcgtgccttgaattacttccacctggctgcagtacgtg | |
| | attcttgatcccgagcttcgggttggaagtgggtgggagagttcgaggccttgc | |
| | gcttaaggagccccttcgcctcgtgcttgagttgaggcctggcctgggcgctgg | |
| | ggccgccgcgtgcgaatctggtggcaccttcgcgcctgtctcgctgctttcgat | |
| | aagtctctagccatttaaaatttttgatgacctgctgcgacgctttttttctgg | |
| | caagatagtcttgtaaatgcgggccaagatctgcacactggtatttcggttttt | |
| | ggggccgcgggcggcgacggggcccgtgcgtcccagcgcacatgttcggcgagg | |
| | cggggcctgcgagcgcggccaccgagaatcggacgggggtagtctcaagctggc | |
| | cggcctgctctggtgcctggcctcgcgccgccgtgtatcgccccgccctgggcg | |
| | gcaaggctggcccggtcggcaccagttgcgtgagcggaaagatggccgcttccc | |
| | ggccctgctgcagggagctcaaaatggaggacgcggcgctcgggagagcgggcg | |
| | ggtgagtcacccacacaaaggaaaagggcctttccgtcctcagccgtcgcttca | |
| | tgtgactccacggagtaccgggcgccgtccaggcacctcgattagttctcgagc | |
| | ttttggagtacgtcgtctttaggttggggggaggggttttatgcgatggagttt | |
| | ccccacactgagtgggtggagactgaagttaggccagcttggcacttgatgtaa | |
| | ttctccttggaatttgccctttttgagtttggatcttggttcattctcaagcct | |
| | cagacagtggttcaaagtttttttcttccatttcaggtgtcgtga | |
| EF-1α intron | gtaagtgccgtgtgtggttcccgcgggcctggcctctttacgggttatggccct | 1841 |
| A | tgcgtgccttgaattacttccacctggctgcagtacgtgattcttgatcccgag | |
| | cttcgggttggaagtgggtgggagagttcgaggccttgcgcttaaggagcccct | |
| | tcgcctcgtgcttgagttgaggcctggcctgggcgctggggccgccgcgtgcga | |
| | atctggtggcaccttcgcgcctgtctcgctgctttcgataagtctctagccatt | |
| | taaaatttttgatgacctgctgcgacgctttttttctggcaagatagtcttgta | |
| | aatgcgggccaagatctgcacactggtatttcggtttttggggccgcgggcggc | |
| | gacggggcccgtgcgtcccagcgcacatgttcggcgaggcggggcctgcgagcg | |
| | cggccaccgagaatcggacgggggtagtctcaagctggccggcctgctctggtg | |
| | cctggcctcgcgccgccgtgtatcgccccgccctgggcggcaaggctggcccgg | |
| | tcggcaccagttgcgtgagcggaaagatggccgcttcccggccctgctgcaggg | |
| | agctcaaaatggaggacgcggcgctcgggagagcgggcgggtgagtcacccaca | |
| | caaaggaaaagggcctttccgtcctcagccgtcgcttcatgtgactccacggag | |
| | taccgggcgccgtccaggcacctcgattagttctcgagcttttggagtacgtcg | |
| | tctttaggttggggggaggggttttatgcgatggagtttccccacactgagtgg | |
| | gtggagactgaagttaggccagcttggcacttgatgtaattctccttggaattt | |
| | gccctttttgagtttggatcttggttcattctcaagcctcagacagtggttcaa | |
| | agtttttttcttccatttcag | |
| Human beta | tcagatcgcctggagacgccatccacgctgttttgacctccatagaagacaccg | 1842 |
| globin intron | ggaccgatccagcctccgcggattcgaatcccggccgggaacggtgcattggaa | |
| (hGBint) | cgcggattccccgtgccaagagtgacgtaagtaccgcctatagagtctataggc | |
| | ccacaaaaaatgctttcttcttttaatatacttttttgtttatcttatttctaa | |
| | tactttccctaatctctttctttcagggcaataatgatacaatgtatcatgcct | |
| | ctttgcaccattctaaagaataacagtgataatttctgggttaaggcaatagca | |
| | atatttctgcatataaatatttctgcatataaattgtaactgatgtaagaggtt | |
| | tcatattgctaatagcagctacaatccagctaccattctgcttttattttatgg | |
| | ttgggataaggctggattattctgagtccaagctaggcccttttgctaatcatg | |
| | ttcatacctcttatcttcctcccacagctcctgggcaacgtgctggtctgtgtg | |
| | ctggcccatcactttggcaaagaatt | |
| Furin - nt | agaaagaggcga | 1724 |
| Furin - aa | RKRR | 1854 |
| T2A - nt | gagggcagaggaagtcttctaacatgcggtgacgtggaggagaatcccggccct | 1726 |
| T2A - nt | EGRGSLLTCGDVEENPGP | 1855 |
| (G4S) | tccggaggcggcggcagc | 1729 |
| Linker - nt | | |
| (G4S) | GGGGS | 1843 |
| Linker - aa | | |
| (G4S)3 | GGAGGGGGGGGTTCGGGTGGCGGCGGAAGTGGGGGCGGTGGTTCT | 1730 |
| Linker - nt | | |
| (G4S)3 - aa | GGGGSGGGGSGGGGS | 1845 |
| poly A signal | gatctttttccctctgccaaaaattatggggacatcatgaagccccttgagcat | 1846 |
| sequence | ctgacttctggctaataaaggaaatttattttcattgcaatagtgtgttggaat | |
| | tttttgtgtctctcactcg | |
| miR183 | AGTGAATTCTACCAGTGCCATA | 1847 |
| binding site | | |
| Spacer | GATAGTTA | |
| miR183 | AGTGAATTCTACCAGTGCCATAGATAGTTAAGTGAATTCTACCAGTGCCATAGA | 1849 |
| binding site | TAGTTAAGTGAATTCTACCAGTGCCATAGATAGTTAAGTGAATTCTACCAGTGC | |
| series | CATA | |
| Signal | ATGGAATTCTCTAGCCCATCTAGAGAGGAATGTCCTAAGCCTCTGTCAAGAGTG | 1850 |
| Sequence - nt | TCCATCATGGCCGGCAGCCTGACAGGCCTGCTGCTGCTGCAGGCCGTGTCCTGG | |
| | GCCAGTGGA | |
| Signal | ATGGAGTTTTCAAGTCCTTCCAGAGAGGAATGTCCCAAGCCTTTGAGTAGGGTA | 1851 |
| Sequence - nt | AGCATCATGGCTGGCAGCCTCACAGGATTGCTTCTACTTCAGGCAGTGTCGTGG | |
| | GCATCAGGT | |
| Signal | atggaattcagcagccccagcagagaggaatgccccaagcctctgagccgggtg | 1852 |
| Sequence - nt | tcaatcatggccggatctctgacaggactgctgctgcttcaggccgtgtcttgg | |
| | gcttctggc | |
| Signal | MEFSSPSREECPKPLSRVSIMAGSLTGLLLLQAVSWASG | 1853 |
| Sequence - aa | | |

[0940] In some embodiments, the viral genome comprises an inverted terminal repeat sequence region (ITR) provided in Table 5, or a nucleotide sequence with at least 70%, 75%, 80%, 85%, 90%, 95% or 99% sequence identity to any of the ITR sequences in Table 5.

[0941] This disclosure also provides in some embodiments, a GBA protein encoded by any one of SEQ ID NOs: 1759-1771 or 1809-1828, or a nucleotide sequence substantially identical (e.g., having at least about 70%, 75%, 80%, 85%, 90%, 92%, 95%, 97%, 98%, or 99% sequence identity) to any of the aforesaid sequences. In some embodiments, the viral genome comprises a promoter provided in Table 5 or a nucleotide sequence with at least 70%, 75%, 80%, 85%, 90%, 95% or 99% sequence identity to any of the promoter sequences in Table 5.

[0942] In some embodiments, the viral genome of an AAV particle described herein comprises the nucleotide sequence, e.g., the nucleotide sequence from the 5′ ITR to the 3′ ITR, of the nucleotide sequences of GBA_VG1 to GBA_VG34, e.g., as described in Tables 18-21 or 29-32, or a nucleotide sequence substantially identical (e.g., having at least about 70%, 75%, 80%, 85%, 90%, 92%, 95%, 97%, 98%, or 99% sequence identity) to any of the aforesaid sequences. In some embodiments, the viral genome of an AAV particle described herein comprises the nucleotide sequence, e.g., the nucleic acid sequence from the 5′ ITR to the 3′ ITR, of any of the nucleotide sequences in Table 18-21 or 29-32, or a nucleotide sequence substantially identical (e.g., having at least about 70%, 75%, 80%, 85%, 90%, 92%, 95%, 97%, 98%, or 99% sequence identity) to any of the aforesaid sequences. In some embodiments, the viral genome of an AAV particle described herein comprises the nucleotide sequence, e.g., the nucleic acid sequence from the 5′ ITR to the 3′ ITR, of any of the nucleotide sequences of SEQ ID NOs: 1759-1771, 1809-1828, or 1870, or a nucleotide sequence substantially identical (e.g., having at least about 70%, 75%, 80%, 85%, 90%, 92%, 95%, 97%, 98%, or 99% sequence identity) to any of the aforesaid sequences.

[0943] This disclosure also provides in some embodiments, a GBA protein (e.g., a GCase protein) encoded by any one of SEQ ID NOs: 1759-1771, 1809-1828, or 1870, or a nucleotide sequence substantially identical (e.g., having at least about 70%, 75%, 80%, 85%, 90%, 92%, 95%, 97%, 98%, or 99% sequence identity) to any of the aforesaid sequences.

[0944] In some embodiments, a viral genome encoding a GBA protein is a wtGBA viral genome, wherein the viral genome comprises a transgene encoding a GBA protein (optionally wherein the nucleotide sequence encoding the GBA protein is a codon optimized nucleotide sequence), but does not encode an enhancement element, e.g., an enhancement element described herein. In some embodiments, a viral genome encoding a GBA protein is an enGBA viral genome, wherein the viral genome comprises a transgene encoding a GBA protein (optionally wherein the nucleotide sequence encoding the GBA protein is a codon optimized nucleotide sequence), and further encodes an enhancement element, e.g., an enhancement element described herein.

TABLE 18
Exemplary Viral Genome (ITR to ITR) sequences

| | | SEQ | |
|---|---|---|---|
| Construct ID | Description (5′ to 3′) | ID NO: | Length |
| GBA_VG1 | ITR (SEQ ID NO: 1829); CMVie (SEQ ID NO: 1831); CB | 1759 | 3413 |
| | promoter (SEQ ID NO: 1834); human beta globin intron (hGBint) | | |
| | (SEQ ID NO: 1842); signal sequence (SEQ ID NO: 1852); GBA | | |
| | Variant 3 coding sequence (SEQ ID NO: 1781); polyA signal | | |
| | region (SEQ ID NO: 1846); ITR (SEQ ID NO: 1830) | | |
| GBA_VG2 | ITR (SEQ ID NO: 1829); CMVie (SEQ ID NO: 1831); CB | 1760 | 3428 |
| | promoter (SEQ ID NO: 1834); human beta globin intron (hGBint) | | |
| | (SEQ ID NO: 1842); signal sequence (SEQ ID NO: 1852); GBA | | |
| | Variant 3 coding sequence (SEQ ID NO: 1781); Lysosomal | | |
| | targeting sequence 1 (LTS1) (SEQ ID NO: 1799); polyA signal | | |
| | region (SEQ ID NO: 1846); ITR (SEQ ID NO: 1830) | | |
| GBA_VG3 | ITR (SEQ ID NO: 1829); CMVie (SEQ ID NO: 1831); CB | 1761 | 3476 |
| | promoter (SEQ ID NO: 1834); human beta globin intron (hGBint) | | |
| | (SEQ ID NO: 1842); signal sequence (SEQ ID NO: 1852); | | |
| | Lysosomal targeting sequence 2 (LTS2) (SEQ ID NO: 1801); | | |
| | GBA Variant 3 coding sequence (SEQ ID NO: 1781); polyA | | |
| | signal region (SEQ ID NO: 1846); ITR (SEQ ID NO: 1830) | | |
| GBA_VG4 | ITR (SEQ ID NO: 1829); CMVie (SEQ ID NO: 1831); CB | 1762 | 3428 |
| | promoter (SEQ ID NO: 1834); human beta globin intron (hGBint) | | |
| | (SEQ ID NO: 1842); signal sequence (SEQ ID NO: 1852); GBA | | |
| | Variant 3 coding sequence (SEQ ID NO: 1781); Lysosomal | | |
| | targeting sequence 3 (LTS3) (SEQ ID NO: 1803); polyA signal | | |
| | region (SEQ ID NO: 1846); ITR (SEQ ID NO: 1830) | | |
| GBA_VG5 | ITR (SEQ ID NO: 1829); CMVie (SEQ ID NO: 1831); CB | 1763 | 3428 |
| | promoter (SEQ ID NO: 1834); human beta globin intron (hGBint) | | |
| | (SEQ ID NO: 1842); signal sequence (SEQ ID NO: 1852); GBA | | |
| | Variant 3 coding sequence (SEQ ID NO: 1781); Lysosomal | | |
| | targeting sequence 4 (LTS4) (SEQ ID NO: 1805); polyA signal | | |
| | region (SEQ ID NO: 1846); ITR (SEQ ID NO: 1830) | | |
| GBA_VG6 | ITR (SEQ ID NO: 1829); CMVie (SEQ ID NO: 1831); CB | 1764 | 3512 |
| | promoter (SEQ ID NO: 1834); human beta globin intron (hGBint) | | |
| | (SEQ ID NO: 1842); signal sequence (SEQ ID NO: 1852); GBA | | |
| | Variant 3 coding sequence (SEQ ID NO: 1781); G4S3 linker | | |
| | coding sequence (SEQ ID NO: 1730); ApoEII coding sequence | | |
| | (SEQ ID NO: 1797); polyA signal region (SEQ ID NO: 1846); | | |
| | ITR (SEQ ID NO: 1830) | | |
| GBA_VG7 | ITR (SEQ ID NO: 1829); CMVie (SEQ ID NO: 1831); CB | 1765 | 3500 |
| | promoter (SEQ ID NO: 1834); human beta globin intron (hGBint) | | |
| | (SEQ ID NO: 1842); signal sequence (SEQ ID NO: 1852); GBA | | |
| | Variant 3 coding sequence (SEQ ID NO: 1781); G4S3 linker | | |
| | coding sequence (SEQ ID NO: 1730); TAT coding sequence (SEQ | | |
| | ID NO: 1793); polyA signal region (SEQ ID NO: 1846); ITR | | |
| | (SEQ ID NO: 1830) | | |
| GBA_VG8 | ITR (SEQ ID NO: 1829); CMVie (SEQ ID NO: 1831); CB | 1766 | 4463 |
| | promoter (SEQ ID NO: 1834); signal sequence (SEQ ID NO: | | |
| | 1852); GBA Variant 3 coding sequence (SEQ ID NO: 1781); Furin | | |
| | cleavage site coding sequence (SEQ ID NO: 1724); T2A coding | | |
| | sequence (SEQ ID NO: 1726); signal sequence (SEQ ID NO: | | |
| | 1856); Prosaposin (PSAP) coding sequence (SEQ ID NO: 1859); | | |
| | polyA signal region (SEQ ID NO: 1846); ITR (SEQ ID NO: 1830) | | |
| GBA_VG9 | ITR (SEQ ID NO: 1829); CMVie (SEQ ID NO: 1831); CB | 1767 | 3878 |
| | promoter (SEQ ID NO: 1834); human beta globin intron (hGBint) | | |
| | (SEQ ID NO: 1842); signal sequence (SEQ ID NO: 1852); GBA | | |
| | Variant 3 coding sequence (SEQ ID NO: 1781); Furin cleavage | | |
| | site coding sequence (SEQ ID NO: 1724); T2A coding sequence | | |
| | (SEQ ID NO: 1726); signal sequence (SEQ ID NO: 1856); SAPC | | |
| | coding sequence (SEQ ID NO: 1787); polyA signal region (SEQ | | |
| | ID NO: 1846); ITR (SEQ ID NO: 1830) | | |
| GBA_VG10 | ITR (SEQ ID NO: 1829); CMVie (SEQ ID NO: 1831); CB | 1768 | 3767 |
| | promoter (SEQ ID NO: 1834); human beta globin intron (hGBint) | | |
| | (SEQ ID NO: 1842); signal sequence (SEQ ID NO: 1852); GBA | | |
| | Variant 3 coding sequence (SEQ ID NO: 1781); Furin cleavage | | |
| | site coding sequence (SEQ ID NO: 1724); T2A coding sequence | | |
| | (SEQ ID NO: 1726); signal sequence (SEQ ID NO: 1856); | | |
| | SAPCv2 coding sequence (SEQ ID NO: 1791); polyA signal | | |
| | region (SEQ ID NO: 1846); ITR (SEQ ID NO: 1830) | | |
| GBA_VG11 | ITR (SEQ ID NO: 1829); CMVie (SEQ ID NO: 1831); CB | 1769 | 3560 |
| | promoter (SEQ ID NO: 1834); human beta globin intron (hGBint) | | |
| | (SEQ ID NO: 1842); signal sequence (SEQ ID NO: 1852); GBA | | |
| | Variant 3 coding sequence (SEQ ID NO: 1781); G4S3 linker | | |
| | coding sequence (SEQ ID NO: 1730); ApoB coding sequence | | |
| | (SEQ ID NO: 1795); polyA signal region (SEQ ID NO: 1846); | | |
| | ITR (SEQ ID NO: 1830) | | |
| GBA_VG12 | ITR (SEQ ID NO: 1829); CMVie (SEQ ID NO: 1831); CB | 1770 | 3500 |
| | promoter (SEQ ID NO: 1834); human beta globin intron (hGBint) | | |
| | (SEQ ID NO: 1842); signal sequence (SEQ ID NO: 1852); TAT | | |
| | coding sequence (SEQ ID NO: 1793); G4S3 linker coding | | |
| | sequence (SEQ ID NO: 1730); GBA Variant 3 coding sequence | | |
| | (SEQ ID NO: 1781); polyA signal region (SEQ ID NO: 1846); | | |
| | ITR (SEQ ID NO: 1830) | | |
| GBA_VG13 | ITR (SEQ ID NO: 1829); CMVie (SEQ ID NO: 1831); CB | 1771 | 3458 |
| | promoter (SEQ ID NO: 1834); human beta globin intron (hGBint) | | |
| | (SEQ ID NO: 1842); signal sequence (SEQ ID NO: 1852); GBA | | |
| | Variant 3 coding sequence (SEQ ID NO: 1781); Lysosomal | | |
| | targeting sequence 5 (LTS5) (SEQ ID NO: 1807); polyA signal | | |
| | region (SEQ ID NO: 1846); ITR (SEQ ID NO: 1830) | | |
| GBA_VG14 | ITR (SEQ ID NO: 1829); CMVie (SEQ ID NO: 1831); CB | 1809 | 3941 |
| | promoter (SEQ ID NO: 1834); human beta globin intron (hGBint) | | |
| | (SEQ ID NO: 1842); signal sequence (SEQ ID NO: 1852); | | |
| | Lysosomal targeting sequence 2 (LTS2) (SEQ ID NO: 1801); | | |
| | GBA Variant 3 coding sequence (SEQ ID NO: 1781); Furin | | |
| | cleavage site coding sequence (SEQ ID NO: 1724); T2A coding | | |
| | sequence (SEQ ID NO: 1726); signal sequence (SEQ ID NO: | | |
| | 1856); SAPC coding sequence (SEQ ID NO: 1787); polyA signal | | |
| | region (SEQ ID NO: 1846); ITR (SEQ ID NO: 1830) | | |
| GBA_VG15 | ITR (SEQ ID NO: 1829); CMVie (SEQ ID NO: 1831); CB | 1810 | 3977 |
| | promoter (SEQ ID NO: 1834); human beta globin intron (hGBint) | | |
| | (SEQ ID NO: 1842); signal sequence (SEQ ID NO: 1852); GBA | | |
| | Variant 3 coding sequence (SEQ ID NO: 1781); G4S3 linker | | |
| | coding sequence (SEQ ID NO: 1730); ApoEII coding sequence | | |
| | (SEQ ID NO: 1797); Furin cleavage site coding sequence (SEQ ID | | |
| | NO: 1724); T2A coding sequence (SEQ ID NO: 1726); signal | | |
| | sequence (SEQ ID NO: 1856); SAPC coding sequence (SEQ ID | | |
| | NO: 1787); polyA signal region (SEQ ID NO: 1846); ITR (SEQ | | |
| | ID NO: 1830) | | |
| GBA_VG16 | ITR (SEQ ID NO: 1829); CMVie (SEQ ID NO: 1831); CB | 1811 | 4040 |
| | promoter (SEQ ID NO: 1834); human beta globin intron (hGBint) | | |
| | (SEQ ID NO: 1842); signal sequence (SEQ ID NO: 1852); | | |
| | Lysosomal targeting sequence 2 (LTS2) (SEQ ID NO: 1801); | | |
| | GBA Variant 3 coding sequence (SEQ ID NO: 1781); G4S3 linker | | |
| | coding sequence (SEQ ID NO: 1730); ApoEII coding sequence | | |
| | (SEQ ID NO: 1797); Furin cleavage site coding sequence (SEQ ID | | |
| | NO: 1724); T2A coding sequence (SEQ ID NO: 1726); signal | | |
| | sequence (SEQ ID NO: 1856); SAPC coding sequence (SEQ ID | | |
| | NO: 1787); polyA signal region (SEQ ID NO: 1846); ITR (SEQ | | |
| | ID NO: 1830) | | |
| GBA_VG17 | ITR (SEQ ID NO: 1829); CMVie (SEQ ID NO: 1831); CB | 1812 | 3413 |
| | promoter (SEQ ID NO: 1834); human beta globin intron (hGBint) | | |
| | (SEQ ID NO: 1842); signal sequence (SEQ ID NO: 1850); GBA | | |
| | Variant 1 coding sequence (SEQ ID NO: 1773); polyA signal | | |
| | region (SEQ ID NO: 1846); ITR (SEQ ID NO: 1830) | | |
| GBA_VG18 | ITR (SEQ ID NO: 1829); EF-1α promoter variant 2 (SEQ ID NO: | 1813 | 3375 |
| | 1839); signal sequence (SEQ ID NO: 1850); GBA Variant 1 | | |
| | coding sequence (SEQ ID NO: 1773); polyA signal region (SEQ | | |
| | ID NO: 1846); ITR (SEQ ID NO: 1830) | | |
| GBA_VG19 | ITR (SEQ ID NO: 1829); CMVie (SEQ ID NO: 1831); CMV | 1814 | 3360 |
| | promoter (SEQ ID NO: 1832); human beta globin intron (hGBint) | | |
| | (SEQ ID NO: 1842); signal sequence (SEQ ID NO: 1850); GBA | | |
| | Variant 1 coding sequence (SEQ ID NO: 1773); polyA signal | | |
| | region (SEQ ID NO: 1846); ITR (SEQ ID NO: 1830) | | |
| GBA_VG20 | ITR (SEQ ID NO: 1829); CAG promoter (SEQ ID NO: 1835); | 1815 | 3901 |
| | signal sequence (SEQ ID NO: 1850); GBA Variant 1 coding | | |
| | sequence (SEQ ID NO: 1773); polyA signal region (SEQ ID NO: | | |
| | 1846); ITR (SEQ ID NO: 1830) | | |
| GBA_VG21 | ITR (SEQ ID NO: 1829); CMVie (SEQ ID NO: 1831); CB | 1816 | 3413 |
| | promoter (SEQ ID NO: 1834); human beta globin intron (hGBint) | | |
| | (SEQ ID NO: 1842); signal sequence (SEQ ID NO: 1851); GBA | | |
| | Variant 2 coding sequence (SEQ ID NO: 1777); polyA signal | | |
| | region (SEQ ID NO: 1846); ITR (SEQ ID NO: 1830) | | |
| GBA_VG22 | ITR (SEQ ID NO: 1829); CMVie (SEQ ID NO: 1831); CB | 1817 | 3878 |
| | promoter (SEQ ID NO: 1834); human beta globin intron (hGBint) | | |
| | (SEQ ID NO: 1842); signal sequence (SEQ ID NO: 1851); GBA | | |
| | Variant 2 coding sequence (SEQ ID NO: 1777); Furin cleavage | | |
| | site coding sequence (SEQ ID NO: 1724); T2A coding sequence | | |
| | (SEQ ID NO: 1726); signal sequence (SEQ ID NO: 1856); SAPC | | |
| | coding sequence (SEQ ID NO: 1787); polyA signal region (SEQ | | |
| | ID NO: 1846); ITR (SEQ ID NO: 1830) | | |
| GBA_VG23 | ITR (SEQ ID NO: 1829); CMVie (SEQ ID NO: 1831); CB | 1818 | 3512 |
| | promoter (SEQ ID NO: 1834); human beta globin intron (hGBint) | | |
| | (SEQ ID NO: 1842); signal sequence (SEQ ID NO: 1851); GBA | | |
| | Variant 2 coding sequence (SEQ ID NO: 1777); G4S3 linker | | |
| | coding sequence (SEQ ID NO: 1730); ApoEII coding sequence | | |
| | (SEQ ID NO: 1797); polyA signal region (SEQ ID NO: 1846); | | |
| | ITR (SEQ ID NO: 1830) | | |
| GBA_VG24 | ITR (SEQ ID NO: 1829); CMVie (SEQ ID NO: 1831); CB | 1819 | 3476 |
| | promoter (SEQ ID NO: 1834); human beta globin intron (hGBint) | | |
| | (SEQ ID NO: 1842); signal sequence (SEQ ID NO: 1851); | | |
| | Lysosomal targeting sequence 2 (LTS2) (SEQ ID NO: 1801); | | |
| | GBA Variant 2 coding sequence (SEQ ID NO: 1777); polyA | | |
| | signal region (SEQ ID NO: 1846); ITR (SEQ ID NO: 1830) | | |
| GBA_VG25 | ITR (SEQ ID NO: 1829); CMVie (SEQ ID NO: 1831); CB | 1820 | 3428 |
| | promoter (SEQ ID NO: 1834); human beta globin intron (hGBint) | | |
| | (SEQ ID NO: 1842); signal sequence (SEQ ID NO: 1851); GBA | | |
| | Variant 2 coding sequence (SEQ ID NO: 1777); Lysosomal | | |
| | targeting sequence 4 (LTS4) (SEQ ID NO: 1805); polyA signal | | |
| | region (SEQ ID NO: 1846); ITR (SEQ ID NO: 1830) | | |
| GBA_VG26 | ITR (SEQ ID NO: 1829); EF-1α promoter variant 3 (SEQ ID NO: | 1821 | 3375 |
| | 1840); signal sequence (SEQ ID NO: 1851); GBA Variant 2 | | |
| | coding sequence (SEQ ID NO: 1777); polyA signal region (SEQ | | |
| | ID NO: 1846); ITR (SEQ ID NO: 1830) | | |
| GBA_VG27 | ITR (SEQ ID NO: 1829); CMVie (SEQ ID NO: 1831); CB | 1822 | 3878 |
| | promoter (SEQ ID NO: 1834); human beta globin intron (hGBint) | | |
| | (SEQ ID NO: 1842); signal sequence (SEQ ID NO: 1850); GBA | | |
| | Variant 1 coding sequence (SEQ ID NO: 1773); Furin cleavage | | |
| | site coding sequence (SEQ ID NO: 1724); T2A coding sequence | | |
| | (SEQ ID NO: 1726); signal sequence (SEQ ID NO: 1856); SAPC | | |
| | coding sequence (SEQ ID NO: 1787); polyA signal region (SEQ | | |
| | ID NO: 1846); ITR (SEQ ID NO: 1830) | | |
| GBA_VG28 | ITR (SEQ ID NO: 1829); CMVie (SEQ ID NO: 1831); CB | 1823 | 3512 |
| | promoter (SEQ ID NO: 1834); human beta globin intron (hGBint) | | |
| | (SEQ ID NO: 1842); signal sequence (SEQ ID NO: 1850); GBA | | |
| | Variant 1 coding sequence (SEQ ID NO: 1773); G4S3 linker | | |
| | coding sequence (SEQ ID NO: 1730); ApoEII coding sequence | | |
| | (SEQ ID NO: 1797); polyA signal region (SEQ ID NO: 1846); | | |
| | ITR (SEQ ID NO: 1830) | | |
| GBA_VG29 | ITR (SEQ ID NO: 1829); CMVie (SEQ ID NO: 1831); CB | 1824 | 3476 |
| | promoter (SEQ ID NO: 1834); human beta globin intron (hGBint) | | |
| | (SEQ ID NO: 1842); signal sequence (SEQ ID NO: 1850); | | |
| | Lysosomal targeting sequence 2 (LTS2) (SEQ ID NO: 1801); | | |
| | GBA Variant 1 coding sequence (SEQ ID NO: 1773); polyA | | |
| | signal region (SEQ ID NO: 1846); ITR (SEQ ID NO: 1830) | | |
| GBA_VG30 | ITR (SEQ ID NO: 1829); CMVie (SEQ ID NO: 1831); CB | 1825 | 3428 |
| | promoter (SEQ ID NO: 1834); human beta globin intron (hGBint) | | |
| | (SEQ ID NO: 1842); signal sequence (SEQ ID NO: 1850); GBA | | |
| | Variant 1 coding sequence (SEQ ID NO: 1773); Lysosomal | | |
| | targeting sequence 4 (LTS4) (SEQ ID NO: 1805); polyA signal | | |
| | region (SEQ ID NO: 1846); ITR (SEQ ID NO: 1830) | | |
| GBA_VG31 | ITR (SEQ ID NO: 1829); CMVie (SEQ ID NO: 1831); CB | 1826 | 3500 |
| | promoter (SEQ ID NO: 1834); human beta globin intron (hGBint) | | |
| | (SEQ ID NO: 1842); signal sequence (SEQ ID NO: 1851); GBA | | |
| | Variant 2 coding sequence (SEQ ID NO: 1777); G4S3 linker | | |
| | coding sequence (SEQ ID NO: 1730); TAT coding sequence (SEQ | | |
| | ID NO: 1793); polyA signal region (SEQ ID NO: 1846); ITR | | |
| | (SEQ ID NO: 1830) | | |
| GBA_VG32 | ITR (SEQ ID NO: 1829); CMVie (SEQ ID NO: 1831); CB | 1827 | 3500 |
| | promoter (SEQ ID NO: 1834); human beta globin intron (hGBint) | | |
| | (SEQ ID NO: 1842); signal sequence (SEQ ID NO: 1850); GBA | | |
| | Variant 1 coding sequence (SEQ ID NO: 1773); G4S3 linker | | |
| | coding sequence (SEQ ID NO: 1730); TAT coding sequence (SEQ | | |
| | ID NO: 1793); polyA signal region (SEQ ID NO: 1846); ITR | | |
| | (SEQ ID NO: 1830) | | |
| GBA_VG33 | ITR (SEQ ID NO: 1829); CMVie (SEQ ID NO: 1831); CB | 1828 | 3571 |
| | promoter (SEQ ID NO: 1834); human beta globin intron (hGBint) | | |
| | (SEQ ID NO: 1842); signal sequence (SEQ ID NO: 1850); GBA | | |
| | Variant 1 coding sequence (SEQ ID NO: 1773); miR183 binding | | |
| | site (SEQ ID NO: 1847); Spacer comprising the nucleotide | | |
| | sequence of GATAGTTA; miR183 binding site (SEQ ID NO: | | |
| | 1847); Spacer comprising the nucleotide sequence of | | |
| | GATAGTTA; miR183 binding site (SEQ ID NO: 1847); Spacer | | |
| | comprising the nucleotide sequence of GATAGTTA; mir183 | | |
| | binding site (SEQ ID NO: 1847); polyA signal region (SEQ ID | | |
| | NO: 1846); ITR (SEQ ID NO: 1830) | | |
| GBA_VG34 | ITR (SEQ ID NO: 1829); CMVie (SEQ ID NO: 1831); CB | 1870 | 3571 |
| | promoter (SEQ ID NO: 1834); human beta globin intron (hGBint) | | |
| | (SEQ ID NO: 1842); signal sequence (SEQ ID NO: 1851); GBA | | |
| | Variant 2 coding sequence (SEQ ID NO: 1777); miR183 binding | | |
| | site (SEQ ID NO: 1847); Spacer comprising the nucleotide | | |
| | sequence of GATAGTTA; miR183 binding site (SEQ ID NO: | | |
| | 1847); Spacer comprising the nucleotide sequence of | | |
| | GATAGTTA; miR183 binding site (SEQ ID NO: 1847); Spacer | | |
| | comprising the nucleotide sequence of GATAGTTA; mir183 | | |
| | binding site (SEQ ID NO: 1847); polyA signal region (SEQ ID | | |
| | NO: 1846); ITR (SEQ ID NO: 1830) | | |

TABLE 19
Exemplary ITR to ITR sequences encoding a GBA protein

| | | SEQ |
|---|---|---|
| | | ID |
| Construct ID | Sequence | NO: |
| GBA_VG17 | ctgcgcgctcgctcgctcactgaggccgcccgggcaaagcccgggcgtcgggcgacc | 1812 |
| | tttggtcgcccggcctcagtgagcgagcgagcgcgcagagagggagtggccaactcc | |
| | atcactaggggttccttgtagttaatgattaacccgccatgctacttatctaccagg | |
| | gtaatggggatcctctagaactatagctagtcGACATTGATTATTGACTAGTTATTA | |
| | ATAGTAATCAATTACGGGGTCATTAGTTCATAGCCCATATATGGAGTTCCGCGTTAC | |
| | ATAACTTACGGTAAATGGCCCGCCTGGCTGACCGCCCAACGACCCCCGCCCATTGAC | |
| | GTCAATAATGACGTATGTTCCCATAGTAACGCCAATAGGGACTTTCCATTGACGTCA | |
| | ATGGGTGGAGTATTTACGGTAAACTGCCCACTTGGCAGTACATCAAGTGTATCATAT | |
| | GCCAAGTACGCCCCCTATTGACGTCAATGACGGTAAATGGCCCGCCTGGCATTATGC | |
| | CCAGTACATGACCTTATGGGACTTTCCTACTTGGCAGTACATCTACGTATTAGTCAT | |
| | CGCTATTACCATGtcgaggccacgttctgcttcactctccccatctcccccccctcc | |
| | ccacccccaattttgtatttatttattttttaattattttgtgcagcgatgggggcg | |
| | gggggggggggcgcgcgccaggcggggcggggcggggcgaggggcgggggcgggcga | |
| | ggcggagaggtgcggcggcagccaatcagagcggcgcgctccgaaagtttcctttta | |
| | tggcgaggcggcggcggcggcggccctataaaaagcgaagcgcgcggcgggcgggag | |
| | caagcttcgtttagtgaaccgtcagatcgcctggagacgccatccacgctgttttga | |
| | cctccatagaagacaccgggaccgatccagcctccgcggattcgaatcccggccggg | |
| | aacggtgcattggaacgcggattccccgtgccaagagtgacgtaagtaccgcctata | |
| | gagtctataggcccacaaaaaatgctttcttcttttaatatacttttttgtttatct | |
| | tatttctaatactttccctaatctctttctttcagggcaataatgatacaatgtatc | |
| | atgcctctttgcaccattctaaagaataacagtgataatttctgggttaaggcaata | |
| | gcaatatttctgcatataaatatttctgcatataaattgtaactgatgtaagaggtt | |
| | tcatattgctaatagcagctacaatccagctaccattctgcttttattttatggttg | |
| | ggataaggctggattattctgagtccaagctaggcccttttgctaatcatgttcata | |
| | cctcttatcttcctcccacagctcctgggcaacgtgctggtctgtgtgctggcccat | |
| | cactttggcaaagaattgggattcgaaccggtgccgccaccATGGAATTCTCTAGCC | |
| | CATCTAGAGAGGAATGTCCTAAGCCTCTGTCAAGAGTGTCCATCATGGCCGGCAGCC | |
| | TGACAGGCCTGCTGCTGCTGCAGGCCGTGTCCTGGGCCAGTGGAGCCCGGCCCTGCA | |
| | TCCCTAAGTCCTTCGGCTATTCTAGCGTGGTCTGCGTGTGTAATGCCACTTACTGCG | |
| | ACAGCTTCGACCCTCCTACCTTCCCCGCCCTTGGAACATTCAGCAGATACGAGAGCA | |
| | CCAGAAGCGGCAGAAGAATGGAACTGAGCATGGGCCCAATCCAGGCCAACCACACCG | |
| | GCACCGGCCTGCTGCTGACACTGCAACCTGAGCAGAAGTTCCAGAAGGTGAAGGGAT | |
| | TTGGAGGCGCCATGACCGACGCTGCTGCTCTGAACATCCTGGCCCTCTCCCCACCTG | |
| | CTCAGAACCTGCTGCTTAAAAGCTACTTCAGCGAGGAAGGCATCGGCTATAACATCA | |
| | TCAGAGTGCCCATGGCCAGCTGCGACTTCAGCATCAGAACATACACCTACGCCGATA | |
| | CACCTGATGACTTCCAACTGCACAACTTCAGCCTGCCTGAAGAGGACACAAAGCTGA | |
| | AAATCCCCCTGATCCACCGGGCCCTGCAGCTGGCCCAGAGACCTGTGAGCCTGCTGG | |
| | CCTCTCCTTGGACAAGCCCCACCTGGCTGAAGACCAATGGAGCTGTGAACGGCAAGG | |
| | GCAGCCTGAAGGGCCAGCCCGGCGACATCTACCACCAAACCTGGGCTCGCTACTTCG | |
| | TGAAATTCCTGGACGCCTACGCTGAGCATAAGCTGCAATTTTGGGCCGTTACAGCCG | |
| | AGAACGAGCCTTCTGCCGGCCTGCTGTCTGGATATCCTTTCCAGTGCCTGGGCTTCA | |
| | CCCCTGAGCACCAGAGAGACTTTATCGCCAGAGATCTGGGGCCTACCCTGGCTAACA | |
| | GCACACACCACAACGTGCGGCTGCTGATGCTGGACGATCAGAGGCTGCTGCTCCCCC | |
| | ACTGGGCCAAGGTGGTGCTGACAGATCCGGAGGCCGCCAAATACGTGCACGGCATCG | |
| | CCGTCCACTGGTACCTGGATTTCCTGGCCCCTGCCAAGGCCACCCTGGGCGAGACAC | |
| | ATAGACTGTTTCCTAATACCATGCTGTTCGCCAGCGAGGCCTGCGTGGGCAGCAAGT | |
| | TCTGGGAACAGAGCGTGCGGCTGGGCAGCTGGGACAGAGGAATGCAGTACAGCCACA | |
| | GCATCATTACCAACCTGCTGTACCACGTGGTGGGCTGGACCGACTGGAACCTGGCCC | |
| | TGAACCCCGAAGGCGGCCCCAACTGGGTGCGGAACTTCGTGGACTCTCCTATCATCG | |
| | TGGATATTACCAAGGATACCTTTTACAAGCAGCCTATGTTCTACCACCTGGGCCACT | |
| | TCAGCAAGTTCATCCCTGAGGGCTCTCAGCGGGTGGGCCTGGTGGCCTCTCAGAAAA | |
| | ACGACCTGGATGCCGTTGCCCTGATGCACCCCGACGGCAGCGCCGTGGTGGTCGTCC | |
| | TGAATAGAAGCTCCAAGGACGTGCCTCTGACCATCAAGGACCCCGCTGTGGGATTTC | |
| | TGGAAACCATCAGCCCTGGCTACAGCATCCACACCTACCTGTGGCGGCGGCAGtagt | |
| | aactcgaggacggggtgaactacgcctgaggatccgatctttttccctctgccaaaa | |
| | attatggggacatcatgaagccccttgagcatctgacttctggctaataaaggaaat | |
| | ttattttcattgcaatagtgtgttggaattttttgtgtctctcactcggcctaggta | |
| | gataagtagcatggcgggttaatcattaactacaaggaacccctagtgatggagttg | |
| | gccactccctctctgcgcgctcgctcgctcactgaggccgggcgaccaaaggtcgcc | |
| | cgacgcccgggctttgcccgggcggcctcagtgagcgagcgagcgcgcag | |
| GBA_VG18 | ctgcgcgctcgctcgctcactgaggccgcccgggcaaagcccgggcgtcgggcgacc | 1813 |
| | tttggtcgcccggcctcagtgagcgagcgagcgcgcagagagggagtggccaactcc | |
| | atcactaggggttccttgtagttaatgattaacccgccatgctacttatctaccagg | |
| | gtaatggggatcctctagaactatagctagtcgacataacgcgtgcatgcgtgaggc | |
| | tccggtgcccgtcagtgggcagagcgcacatcgcccacagtccccgagaagttgggg | |
| | ggaggggtcggcaattgaaccggtgcctagagaaggtggcgcggggtaaactgggaa | |
| | agtgatgtcgtgtactggctccgcctttttcccgagggtgggggagaaccgtatata | |
| | agtgcagtagtcgccgtgaacgttctttttcgcaacgggtttgccgccagaacacag | |
| | gtaagtgccgtgtgtggttcccgcgggcctggcctctttacgggttatggcccttgc | |
| | gtgccttgaattacttccacctggctgcagtacgtgattcttgatcccgagcttcgg | |
| | gttggaagtgggtgggagagttcgaggccttgcgcttaaggagccccttcgcctcgt | |
| | gcttgagttgaggcctggcctgggcgctggggccgccgcgtgcgaatctggtggcac | |
| | cttcgcgcctgtctcgctgctttcgataagtctctagccatttaaaatttttgatga | |
| | cctgctgcgacgctttttttctggcaagatagtcttgtaaatgcgggccaagatctg | |
| | cacactggtatttcggtttttggggccgcgggcggcgacggggcccgtgcgtcccag | |
| | cgcacatgttcggcgaggcggggcctgcgagcgcggccaccgagaatcggacggggg | |
| | tagtctcaagctggccggcctgctctggtgcctggcctcgcgccgccgtgtatcgcc | |
| | ccgccctgggcggcaaggctggcccggtcggcaccagttgcgtgagcggaaagatgg | |
| | ccgcttcccggccctgctgcagggagctcaaaatggaggacgcggcgctcgggagag | |
| | cgggcgggtgagtcacccacacaaaggaaaagggcctttccgtcctcagccgtcgct | |
| | tcatgtgactccacggagtaccgggcgccgtccaggcacctcgattagttctcgagc | |
| | ttttggagtacgtcgtctttaggttggggggaggggttttatgcgatggagtttccc | |
| | cacactgagtgggtggagactgaagttaggccagcttggcacttgatgtaattctcc | |
| | ttggaatttgccctttttgagtttggatcttggttcattctcaagcctcagacagtg | |
| | gttcaaagtttttttcttccatttcaggtgtcgtgagggattcgaaccggtgccgcc | |
| | accATGGAATTCTCTAGCCCATCTAGAGAGGAATGTCCTAAGCCTCTGTCAAGAGTG | |
| | TCCATCATGGCCGGCAGCCTGACAGGCCTGCTGCTGCTGCAGGCCGTGTCCTGGGCC | |
| | AGTGGAGCCCGGCCCTGCATCCCTAAGTCCTTCGGCTATTCTAGCGTGGTCTGCGTG | |
| | TGTAATGCCACTTACTGCGACAGCTTCGACCCTCCTACCTTCCCCGCCCTTGGAACA | |
| | TTCAGCAGATACGAGAGCACCAGAAGCGGCAGAAGAATGGAACTGAGCATGGGCCCA | |
| | ATCCAGGCCAACCACACCGGCACCGGCCTGCTGCTGACACTGCAACCTGAGCAGAAG | |
| | TTCCAGAAGGTGAAGGGATTTGGAGGCGCCATGACCGACGCTGCTGCTCTGAACATC | |
| | CTGGCCCTCTCCCCACCTGCTCAGAACCTGCTGCTTAAAAGCTACTTCAGCGAGGAA | |
| | GGCATCGGCTATAACATCATCAGAGTGCCCATGGCCAGCTGCGACTTCAGCATCAGA | |
| | ACATACACCTACGCCGATACACCTGATGACTTCCAACTGCACAACTTCAGCCTGCCT | |
| | GAAGAGGACACAAAGCTGAAAATCCCCCTGATCCACCGGGCCCTGCAGCTGGCCCAG | |
| | AGACCTGTGAGCCTGCTGGCCTCTCCTTGGACAAGCCCCACCTGGCTGAAGACCAAT | |
| | GGAGCTGTGAACGGCAAGGGCAGCCTGAAGGGCCAGCCCGGCGACATCTACCACCAA | |
| | ACCTGGGCTCGCTACTTCGTGAAATTCCTGGACGCCTACGCTGAGCATAAGCTGCAA | |
| | TTTTGGGCCGTTACAGCCGAGAACGAGCCTTCTGCCGGCCTGCTGTCTGGATATCCT | |
| | TTCCAGTGCCTGGGCTTCACCCCTGAGCACCAGAGAGACTTTATCGCCAGAGATCTG | |
| | GGGCCTACCCTGGCTAACAGCACACACCACAACGTGCGGCTGCTGATGCTGGACGAT | |
| | CAGAGGCTGCTGCTCCCCCACTGGGCCAAGGTGGTGCTGACAGATCCGGAGGCCGCC | |
| | AAATACGTGCACGGCATCGCCGTCCACTGGTACCTGGATTTCCTGGCCCCTGCCAAG | |
| | GCCACCCTGGGCGAGACACATAGACTGTTTCCTAATACCATGCTGTTCGCCAGCGAG | |
| | GCCTGCGTGGGCAGCAAGTTCTGGGAACAGAGCGTGCGGCTGGGCAGCTGGGACAGA | |
| | GGAATGCAGTACAGCCACAGCATCATTACCAACCTGCTGTACCACGTGGTGGGCTGG | |
| | ACCGACTGGAACCTGGCCCTGAACCCCGAAGGCGGCCCCAACTGGGTGCGGAACTTC | |
| | GTGGACTCTCCTATCATCGTGGATATTACCAAGGATACCTTTTACAAGCAGCCTATG | |
| | TTCTACCACCTGGGCCACTTCAGCAAGTTCATCCCTGAGGGCTCTCAGCGGGTGGGC | |
| | CTGGTGGCCTCTCAGAAAAACGACCTGGATGCCGTTGCCCTGATGCACCCCGACGGC | |
| | AGCGCCGTGGTGGTCGTCCTGAATAGAAGCTCCAAGGACGTGCCTCTGACCATCAAG | |
| | GACCCCGCTGTGGGATTTCTGGAAACCATCAGCCCTGGCTACAGCATCCACACCTAC | |
| | CTGTGGCGGCGGCAGtagtaactcgaggacggggtgaactacgcctgaggatccgat | |
| | ctttttccctctgccaaaaattatggggacatcatgaagccccttgagcatctgact | |
| | tctggctaataaaggaaatttattttcattgcaatagtgtgttggaattttttgtgt | |
| | ctctcactcggcctaggtagataagtagcatggcgggttaatcattaactacaagga | |
| | acccctagtgatggagttggccactccctctctgcgcgctcgctcgctcactgaggc | |
| | cgggcgaccaaaggtcgcccgacgcccgggctttgcccgggcggcctcagtgagcga | |
| | gcgagcgcgcag | |
| GBA_VG27 | ctgcgcgctcgctcgctcactgaggccgcccgggcaaagcccgggcgtcgggcgacc | 1822 |
| | tttggtcgcccggcctcagtgagcgagcgagcgcgcagagagggagtggccaactcc | |
| | atcactaggggttcctTGTAGTTAATGATTAACCCGCCATGCTACTTATCTACCAGG | |
| | GTAATGGGGATCCTCTAGAACTATAGCTAGTCGACATTGATTATTGACTAGTTATTA | |
| | ATAGTAATCAATTACGGGGTCATTAGTTCATAGCCCATATATGGAGTTCCGCGTTAC | |
| | ATAACTTACGGTAAATGGCCCGCCTGGCTGACCGCCCAACGACCCCCGCCCATTGAC | |
| | GTCAATAATGACGTATGTTCCCATAGTAACGCCAATAGGGACTTTCCATTGACGTCA | |
| | ATGGGTGGAGTATTTACGGTAAACTGCCCACTTGGCAGTACATCAAGTGTATCATAT | |
| | GCCAAGTACGCCCCCTATTGACGTCAATGACGGTAAATGGCCCGCCTGGCATTATGC | |
| | CCAGTACATGACCTTATGGGACTTTCCTACTTGGCAGTACATCTACGTATTAGTCAT | |
| | CGCTATTACCATGTCGAGGccacgttctgcttcactctccccatctcccccccctcc | |
| | ccacccccaattttgtatttatttattttttaattattttgtgcagcgatgggggcg | |
| | gggggggggggcgcgcgccaggcggggcggggcggggcgaggggcggggcggggcga | |
| | ggcggagaggtgcggcggcagccaatcagagcggcgcgctccgaaagtttcctttta | |
| | tggcgaggcggcggcggcggcggccctataaaaagcgaagcgcgcggcgggCGGGAG | |
| | CAAGCTTCGTTTAGTGAACCGtcagatcgcctggagacgccatccacgctgttttga | |
| | cctccatagaagacaccgggaccgatccagcctccgcggattcgaatcccggccggg | |
| | aacggtgcattggaacgcggattccccgtgccaagagtgacgtaagtaccgcctata | |
| | gagtctataggcccacaaaaaatgctttcttcttttaatatacttttttgtttatct | |
| | tatttctaatactttccctaatctctttctttcagggcaataatgatacaatgtatc | |
| | atgcctctttgcaccattctaaagaataacagtgataatttctgggttaaggcaata | |
| | gcaatatttctgcatataaatatttctgcatataaattgtaactgatgtaagaggtt | |
| | tcatattgctaatagcagctacaatccagctaccattctgcttttattttatggttg | |
| | ggataaggctggattattctgagtccaagctaggcccttttgctaatcatgttcata | |
| | cctcttatcttcctcccacagctcctgggcaacgtgctggtctgtgtgctggcccat | |
| | cactttggcaaagaattGGGATTCGAACCGGTGCCGCCACCATGGAATTCTCTAGCC | |
| | CATCTAGAGAGGAATGTCCTAAGCCTCTGTCAAGAGTGTCCATCATGGCCGGCAGCC | |
| | TGACAGGCCTGCTGCTGCTGCAGGCCGTGTCCTGGGCCAGTGGAGCCCGGCCCTGCA | |
| | TCCCTAAGTCCTTCGGCTATTCTAGCGTGGTCTGCGTGTGTAATGCCACTTACTGCG | |
| | ACAGCTTCGACCCTCCTACCTTCCCCGCCCTTGGAACATTCAGCAGATACGAGAGCA | |
| | CCAGAAGCGGCAGAAGAATGGAACTGAGCATGGGCCCAATCCAGGCCAACCACACCG | |
| | GCACCGGCCTGCTGCTGACACTGCAACCTGAGCAGAAGTTCCAGAAGGTGAAGGGAT | |
| | TTGGAGGCGCCATGACCGACGCTGCTGCTCTGAACATCCTGGCCCTCTCCCCACCTG | |
| | CTCAGAACCTGCTGCTTAAAAGCTACTTCAGCGAGGAAGGCATCGGCTATAACATCA | |
| | TCAGAGTGCCCATGGCCAGCTGCGACTTCAGCATCAGAACATACACCTACGCCGATA | |
| | CACCTGATGACTTCCAACTGCACAACTTCAGCCTGCCTGAAGAGGACACAAAGCTGA | |
| | AAATCCCCCTGATCCACCGGGCCCTGCAGCTGGCCCAGAGACCTGTGAGCCTGCTGG | |
| | CCTCTCCTTGGACAAGCCCCACCTGGCTGAAGACCAATGGAGCTGTGAACGGCAAGG | |
| | GCAGCCTGAAGGGCCAGCCCGGCGACATCTACCACCAAACCTGGGCTCGCTACTTCG | |
| | TGAAATTCCTGGACGCCTACGCTGAGCATAAGCTGCAATTTTGGGCCGTTACAGCCG | |
| | AGAACGAGCCTTCTGCCGGCCTGCTGTCTGGATATCCTTTCCAGTGCCTGGGCTTCA | |
| | CCCCTGAGCACCAGAGAGACTTTATCGCCAGAGATCTGGGGCCTACCCTGGCTAACA | |
| | GCACACACCACAACGTGCGGCTGCTGATGCTGGACGATCAGAGGCTGCTGCTCCCCC | |
| | ACTGGGCCAAGGTGGTGCTGACAGATCCGGAGGCCGCCAAATACGTGCACGGCATCG | |
| | CCGTCCACTGGTACCTGGATTTCCTGGCCCCTGCCAAGGCCACCCTGGGCGAGACAC | |
| | ATAGACTGTTTCCTAATACCATGCTGTTCGCCAGCGAGGCCTGCGTGGGCAGCAAGT | |
| | TCTGGGAACAGAGCGTGCGGCTGGGCAGCTGGGACAGAGGAATGCAGTACAGCCACA | |
| | GCATCATTACCAACCTGCTGTACCACGTGGTGGGCTGGACCGACTGGAACCTGGCCC | |
| | TGAACCCCGAAGGCGGCCCCAACTGGGTGCGGAACTTCGTGGACTCTCCTATCATCG | |
| | TGGATATTACCAAGGATACCTTTTACAAGCAGCCTATGTTCTACCACCTGGGCCACT | |
| | TCAGCAAGTTCATCCCTGAGGGCTCTCAGCGGGTGGGCCTGGTGGCCTCTCAGAAAA | |
| | ACGACCTGGATGCCGTTGCCCTGATGCACCCCGACGGCAGCGCCGTGGTGGTCGTCC | |
| | TGAATAGAAGCTCCAAGGACGTGCCTCTGACCATCAAGGACCCCGCTGTGGGATTTC | |
| | TGGAAACCATCAGCCCTGGCTACAGCATCCACACCTACCTGTGGCGGCGGCAGAgaa | |
| | agaggcgagagggcagaggaagtcttctaacatgcggtgacgtggaggagaatcccg | |
| | gccctATGTACGCCCTCTTCCTCCTGGCCAGCCTCCTGGGCGCGGCTCTAGCCgtga | |
| | aagagatgcccatgcagactctggtccccgccaaagtggcctccaagaatgtcatcc | |
| | ctgccctggaactggtggagcccattaagaagcacgaggtcccagcaaagtctgatg | |
| | tttactgtgaggtgtgtgaattcctggtgaaggaggtgaccaagctgattgacaaca | |
| | acaagactgagaaagaaatactcgacgcttttgacaaaatgtgctcgaagctgccga | |
| | agtccctgtcggaagagtgccaggaggtggtggacacgtacggcagctccatcctgt | |
| | ccatcctgctggaggaggtcagccctgagctggtgtgcagcatgctgcacctctgct | |
| | ctggcTAGTAACTCGAGGACGGGGTGAACTACGCCTGAGGATCCgatctttttccct | |
| | ctgccaaaaattatggggacatcatgaagccccttgagcatctgacttctggctaat | |
| | aaaggaaatttattttcattgcaatagtgtgttggaattttttgtgtctctcactcg | |
| | GCCTAGGTAGATAAGTAGCATGGCGGGTTAATCATTAACTACAaggaacccctagtg | |
| | atggagttggccactccctctctgcgcgctcgctcgctcactgaggccgggcgacca | |
| | aaggtcgcccgacgcccgggctttgcccgggcggcctcagtgagcgagcgagcgcgc | |
| | ag | |
| GBA_VG29 | ctgcgcgctcgctcgctcactgaggccgcccgggcaaagcccgggcgtcgggcgacc | 1824 |
| | tttggtcgcccggcctcagtgagcgagcgagcgcgcagagagggagtggccaactcc | |
| | atcactaggggttcctTGTAGTTAATGATTAACCCGCCATGCTACTTATCTACCAGG | |
| | GTAATGGGGATCCTCTAGAACTATAGCTAGTCGACATTGATTATTGACTAGTTATTA | |
| | ATAGTAATCAATTACGGGGTCATTAGTTCATAGCCCATATATGGAGTTCCGCGTTAC | |
| | ATAACTTACGGTAAATGGCCCGCCTGGCTGACCGCCCAACGACCCCCGCCCATTGAC | |
| | GTCAATAATGACGTATGTTCCCATAGTAACGCCAATAGGGACTTTCCATTGACGTCA | |
| | ATGGGTGGAGTATTTACGGTAAACTGCCCACTTGGCAGTACATCAAGTGTATCATAT | |
| | GCCAAGTACGCCCCCTATTGACGTCAATGACGGTAAATGGCCCGCCTGGCATTATGC | |
| | CCAGTACATGACCTTATGGGACTTTCCTACTTGGCAGTACATCTACGTATTAGTCAT | |
| | CGCTATTACCATGTCGAGGccacgttctgcttcactctccccatctcccccccctcc | |
| | ccacccccaattttgtatttatttattttttaattattttgtgcagcgatgggggcg | |
| | gggggggggggcgcgcgccaggcggggcggggcggggcgaggggcggggcggggcga | |
| | ggcggagaggtgcggcggcagccaatcagagcggcgcgctccgaaagtttcctttta | |
| | tggcgaggcggcggcggcggcggccctataaaaagcgaagcgcgcggcgggCGGGAG | |
| | CAAGCTTCGTTTAGTGAACCGtcagatcgcctggagacgccatccacgctgttttga | |
| | cctccatagaagacaccgggaccgatccagcctccgcggattcgaatcccggccggg | |
| | aacggtgcattggaacgcggattccccgtgccaagagtgacgtaagtaccgcctata | |
| | gagtctataggcccacaaaaaatgctttcttcttttaatatacttttttgtttatct | |
| | tatttctaatactttccctaatctctttctttcagggcaataatgatacaatgtatc | |
| | atgcctctttgcaccattctaaagaataacagtgataatttctgggttaaggcaata | |
| | gcaatatttctgcatataaatatttctgcatataaattgtaactgatgtaagaggtt | |
| | tcatattgctaatagcagctacaatccagctaccattctgcttttattttatggttg | |
| | ggataaggctggattattctgagtccaagctaggcccttttgctaatcatgttcata | |
| | cctcttatcttcctcccacagctcctgggcaacgtgctggtctgtgtgctggcccat | |
| | cactttggcaaagaattGGGATTCGAACCGGTGCCGCCACCATGGAATTCTCTAGCC | |
| | CATCTAGAGAGGAATGTCCTAAGCCTCTGTCAAGAGTGTCCATCATGGCCGGCAGCC | |
| | TGACAGGCCTGCTGCTGCTGCAGGCCGTGTCCTGGGCCAGTGGAatgaaggagaccg | |
| | ctgctgcaaagttcgagagacagcatatggatagctccacaagcgccgcaGCCCGGC | |
| | CCTGCATCCCTAAGTCCTTCGGCTATTCTAGCGTGGTCTGCGTGTGTAATGCCACTT | |
| | ACTGCGACAGCTTCGACCCTCCTACCTTCCCCGCCCTTGGAACATTCAGCAGATACG | |
| | AGAGCACCAGAAGCGGCAGAAGAATGGAACTGAGCATGGGCCCAATCCAGGCCAACC | |
| | ACACCGGCACCGGCCTGCTGCTGACACTGCAACCTGAGCAGAAGTTCCAGAAGGTGA | |
| | AGGGATTTGGAGGCGCCATGACCGACGCTGCTGCTCTGAACATCCTGGCCCTCTCCC | |
| | CACCTGCTCAGAACCTGCTGCTTAAAAGCTACTTCAGCGAGGAAGGCATCGGCTATA | |
| | ACATCATCAGAGTGCCCATGGCCAGCTGCGACTTCAGCATCAGAACATACACCTACG | |
| | CCGATACACCTGATGACTTCCAACTGCACAACTTCAGCCTGCCTGAAGAGGACACAA | |
| | AGCTGAAAATCCCCCTGATCCACCGGGCCCTGCAGCTGGCCCAGAGACCTGTGAGCC | |
| | TGCTGGCCTCTCCTTGGACAAGCCCCACCTGGCTGAAGACCAATGGAGCTGTGAACG | |
| | GCAAGGGCAGCCTGAAGGGCCAGCCCGGCGACATCTACCACCAAACCTGGGCTCGCT | |
| | ACTTCGTGAAATTCCTGGACGCCTACGCTGAGCATAAGCTGCAATTTTGGGCCGTTA | |
| | CAGCCGAGAACGAGCCTTCTGCCGGCCTGCTGTCTGGATATCCTTTCCAGTGCCTGG | |
| | GCTTCACCCCTGAGCACCAGAGAGACTTTATCGCCAGAGATCTGGGGCCTACCCTGG | |
| | CTAACAGCACACACCACAACGTGCGGCTGCTGATGCTGGACGATCAGAGGCTGCTGC | |
| | TCCCCCACTGGGCCAAGGTGGTGCTGACAGATCCGGAGGCCGCCAAATACGTGCACG | |
| | GCATCGCCGTCCACTGGTACCTGGATTTCCTGGCCCCTGCCAAGGCCACCCTGGGCG | |
| | AGACACATAGACTGTTTCCTAATACCATGCTGTTCGCCAGCGAGGCCTGCGTGGGCA | |
| | GCAAGTTCTGGGAACAGAGCGTGCGGCTGGGCAGCTGGGACAGAGGAATGCAGTACA | |
| | GCCACAGCATCATTACCAACCTGCTGTACCACGTGGTGGGCTGGACCGACTGGAACC | |
| | TGGCCCTGAACCCCGAAGGCGGCCCCAACTGGGTGCGGAACTTCGTGGACTCTCCTA | |
| | TCATCGTGGATATTACCAAGGATACCTTTTACAAGCAGCCTATGTTCTACCACCTGG | |
| | GCCACTTCAGCAAGTTCATCCCTGAGGGCTCTCAGCGGGTGGGCCTGGTGGCCTCTC | |
| | AGAAAAACGACCTGGATGCCGTTGCCCTGATGCACCCCGACGGCAGCGCCGTGGTGG | |
| | TCGTCCTGAATAGAAGCTCCAAGGACGTGCCTCTGACCATCAAGGACCCCGCTGTGG | |
| | GATTTCTGGAAACCATCAGCCCTGGCTACAGCATCCACACCTACCTGTGGCGGCGGC | |
| | AGTAGTAACTCGAGGACGGGGTGAACTACGCCTGAGGATCCgatctttttccctctg | |
| | ccaaaaattatggggacatcatgaagccccttgagcatctgacttctggctaataaa | |
| | ggaaatttattttcattgcaatagtgtgttggaattttttgtgtctctcactcgGCC | |
| | TAGGTAGATAAGTAGCATGGCGGGTTAATCATTAACTACAaggaacccctagtgatg | |
| | gagttggccactccctctctgcgcgctcgctcgctcactgaggccgggcgaccaaag | |
| | gtcgcccgacgcccgggctttgcccgggcggcctcagtgagcgagcgagcgcgcag | |
| GBA_VG32 | ctgcgcgctcgctcgctcactgaggccgcccgggcaaagcccgggcgtcgggcgacc | 1827 |
| | tttggtcgcccggcctcagtgagcgagcgagcgcgcagagagggagtggccaactcc | |
| | atcactaggggttcctTGTAGTTAATGATTAACCCGCCATGCTACTTATCTACCAGG | |
| | GTAATGGGGATCCTCTAGAACTATAGCTAGTCGACATTGATTATTGACTAGTTATTA | |
| | ATAGTAATCAATTACGGGGTCATTAGTTCATAGCCCATATATGGAGTTCCGCGTTAC | |
| | ATAACTTACGGTAAATGGCCCGCCTGGCTGACCGCCCAACGACCCCCGCCCATTGAC | |
| | GTCAATAATGACGTATGTTCCCATAGTAACGCCAATAGGGACTTTCCATTGACGTCA | |
| | ATGGGTGGAGTATTTACGGTAAACTGCCCACTTGGCAGTACATCAAGTGTATCATAT | |
| | GCCAAGTACGCCCCCTATTGACGTCAATGACGGTAAATGGCCCGCCTGGCATTATGC | |
| | CCAGTACATGACCTTATGGGACTTTCCTACTTGGCAGTACATCTACGTATTAGTCAT | |
| | CGCTATTACCATGTCGAGGccacgttctgcttcactctccccatctcccccccctcc | |
| | ccacccccaattttgtatttatttattttttaattattttgtgcagcgatgggggcg | |
| | gggggggggggcgcgcgccaggcggggcggggcggggcgaggggcggggcggggcga | |
| | ggcggagaggtgcggcggcagccaatcagagcggcgcgctccgaaagtttcctttta | |
| | tggcgaggcggcggcggcggcggccctataaaaagcgaagcgcgcggcgggCGGGAG | |
| | CAAGCTTCGTTTAGTGAACCGtcagatcgcctggagacgccatccacgctgttttga | |
| | cctccatagaagacaccgggaccgatccagcctccgcggattcgaatcccggccggg | |
| | aacggtgcattggaacgcggattccccgtgccaagagtgacgtaagtaccgcctata | |
| | gagtctataggcccacaaaaaatgctttcttcttttaatatacttttttgtttatct | |
| | tatttctaatactttccctaatctctttctttcagggcaataatgatacaatgtatc | |
| | atgcctctttgcaccattctaaagaataacagtgataatttctgggttaaggcaata | |
| | gcaatatttctgcatataaatatttctgcatataaattgtaactgatgtaagaggtt | |
| | tcatattgctaatagcagctacaatccagctaccattctgcttttattttatggttg | |
| | ggataaggctggattattctgagtccaagctaggcccttttgctaatcatgttcata | |
| | cctcttatcttcctcccacagctcctgggcaacgtgctggtctgtgtgctggcccat | |
| | cactttggcaaagaattGGGATTCGAACCGGTGCCGCCACCATGGAATTCTCTAGCC | |
| | CATCTAGAGAGGAATGTCCTAAGCCTCTGTCAAGAGTGTCCATCATGGCCGGCAGCC | |
| | TGACAGGCCTGCTGCTGCTGCAGGCCGTGTCCTGGGCCAGTGGAGCCCGGCCCTGCA | |
| | TCCCTAAGTCCTTCGGCTATTCTAGCGTGGTCTGCGTGTGTAATGCCACTTACTGCG | |
| | ACAGCTTCGACCCTCCTACCTTCCCCGCCCTTGGAACATTCAGCAGATACGAGAGCA | |
| | CCAGAAGCGGCAGAAGAATGGAACTGAGCATGGGCCCAATCCAGGCCAACCACACCG | |
| | GCACCGGCCTGCTGCTGACACTGCAACCTGAGCAGAAGTTCCAGAAGGTGAAGGGAT | |
| | TTGGAGGCGCCATGACCGACGCTGCTGCTCTGAACATCCTGGCCCTCTCCCCACCTG | |
| | CTCAGAACCTGCTGCTTAAAAGCTACTTCAGCGAGGAAGGCATCGGCTATAACATCA | |
| | TCAGAGTGCCCATGGCCAGCTGCGACTTCAGCATCAGAACATACACCTACGCCGATA | |
| | CACCTGATGACTTCCAACTGCACAACTTCAGCCTGCCTGAAGAGGACACAAAGCTGA | |
| | AAATCCCCCTGATCCACCGGGCCCTGCAGCTGGCCCAGAGACCTGTGAGCCTGCTGG | |
| | CCTCTCCTTGGACAAGCCCCACCTGGCTGAAGACCAATGGAGCTGTGAACGGCAAGG | |
| | GCAGCCTGAAGGGCCAGCCCGGCGACATCTACCACCAAACCTGGGCTCGCTACTTCG | |
| | TGAAATTCCTGGACGCCTACGCTGAGCATAAGCTGCAATTTTGGGCCGTTACAGCCG | |
| | AGAACGAGCCTTCTGCCGGCCTGCTGTCTGGATATCCTTTCCAGTGCCTGGGCTTCA | |
| | CCCCTGAGCACCAGAGAGACTTTATCGCCAGAGATCTGGGGCCTACCCTGGCTAACA | |
| | GCACACACCACAACGTGCGGCTGCTGATGCTGGACGATCAGAGGCTGCTGCTCCCCC | |
| | ACTGGGCCAAGGTGGTGCTGACAGATCCGGAGGCCGCCAAATACGTGCACGGCATCG | |
| | CCGTCCACTGGTACCTGGATTTCCTGGCCCCTGCCAAGGCCACCCTGGGCGAGACAC | |
| | ATAGACTGTTTCCTAATACCATGCTGTTCGCCAGCGAGGCCTGCGTGGGCAGCAAGT | |
| | TCTGGGAACAGAGCGTGCGGCTGGGCAGCTGGGACAGAGGAATGCAGTACAGCCACA | |
| | GCATCATTACCAACCTGCTGTACCACGTGGTGGGCTGGACCGACTGGAACCTGGCCC | |
| | TGAACCCCGAAGGCGGCCCCAACTGGGTGCGGAACTTCGTGGACTCTCCTATCATCG | |
| | TGGATATTACCAAGGATACCTTTTACAAGCAGCCTATGTTCTACCACCTGGGCCACT | |
| | TCAGCAAGTTCATCCCTGAGGGCTCTCAGCGGGTGGGCCTGGTGGCCTCTCAGAAAA | |
| | ACGACCTGGATGCCGTTGCCCTGATGCACCCCGACGGCAGCGCCGTGGTGGTCGTCC | |
| | TGAATAGAAGCTCCAAGGACGTGCCTCTGACCATCAAGGACCCCGCTGTGGGATTTC | |
| | TGGAAACCATCAGCCCTGGCTACAGCATCCACACCTACCTGTGGCGGCGGCAGGGAG | |
| | GGGGGGGTTCGGGTGGCGGCGGAAGTGGGGGCGGTGGTTCTtatggcaggaaaaagc | |
| | ggaggcaaaggcgccgccccccccagTAGTAACTCGAGGACGGGGTGAACTACGCCT | |
| | GAGGATCCgatctttttccctctgccaaaaattatggggacatcatgaagccccttg | |
| | agcatctgacttctggctaataaaggaaatttattttcattgcaatagtgtgttgga | |
| | attttttgtgtctctcactcgGCCTAGGTAGATAAGTAGCATGGCGGGTTAATCATT | |
| | AACTACAaggaacccctagtgatggagttggccactccctctctgcgcgctcgctcg | |
| | ctcactgaggccgggcgaccaaaggtcgcccgacgcccgggctttgcccgggcggcc | |
| | tcagtgagcgagcgagcgcgcag | |
| GBA_VG33 | ctgcgcgctcgctcgctcactgaggccgcccgggcaaagcccgggcgtcgggcgacc | 1828 |
| | tttggtcgcccggcctcagtgagcgagcgagcgcgcagagagggagtggccaactcc | |
| | atcactaggggttcctTGTAGTTAATGATTAACCCGCCATGCTACTTATCTACCAGG | |
| | GTAATGGGGATCCTCTAGAACTATAGCTAGTCGACATTGATTATTGACTAGTTATTA | |
| | ATAGTAATCAATTACGGGGTCATTAGTTCATAGCCCATATATGGAGTTCCGCGTTAC | |
| | ATAACTTACGGTAAATGGCCCGCCTGGCTGACCGCCCAACGACCCCCGCCCATTGAC | |
| | GTCAATAATGACGTATGTTCCCATAGTAACGCCAATAGGGACTTTCCATTGACGTCA | |
| | ATGGGTGGAGTATTTACGGTAAACTGCCCACTTGGCAGTACATCAAGTGTATCATAT | |
| | GCCAAGTACGCCCCCTATTGACGTCAATGACGGTAAATGGCCCGCCTGGCATTATGC | |
| | CCAGTACATGACCTTATGGGACTTTCCTACTTGGCAGTACATCTACGTATTAGTCAT | |
| | CGCTATTACCATGTCGAGGccacgttctgcttcactctccccatctcccccccctcc | |
| | ccacccccaattttgtatttatttattttttaattattttgtgcagcgatgggggcg | |
| | gggggggggggcgcgcgccaggcggggcggggcggggcgaggggcggggcggggcga | |
| | ggcggagaggtgcggcggcagccaatcagagcggcgcgctccgaaagtttcctttta | |
| | tggcgaggcggcggcggcggcggccctataaaaagcgaagcgcgcggcgggCGGGAG | |
| | CAAGCTTCGTTTAGTGAACCGtcagatcgcctggagacgccatccacgctgttttga | |
| | cctccatagaagacaccgggaccgatccagcctccgcggattcgaatcccggccggg | |
| | aacggtgcattggaacgcggattccccgtgccaagagtgacgtaagtaccgcctata | |
| | gagtctataggcccacaaaaaatgctttcttcttttaatatacttttttgtttatct | |
| | tatttctaatactttccctaatctctttctttcagggcaataatgatacaatgtatc | |
| | atgcctctttgcaccattctaaagaataacagtgataatttctgggttaaggcaata | |
| | gcaatatttctgcatataaatatttctgcatataaattgtaactgatgtaagaggtt | |
| | tcatattgctaatagcagctacaatccagctaccattctgcttttattttatggttg | |
| | ggataaggctggattattctgagtccaagctaggcccttttgctaatcatgttcata | |
| | cctcttatcttcctcccacagctcctgggcaacgtgctggtctgtgtgctggcccat | |
| | cactttggcaaagaattGGGATTCGAACCGGTGCCGCCACCATGGAATTCTCTAGCC | |
| | CATCTAGAGAGGAATGTCCTAAGCCTCTGTCAAGAGTGTCCATCATGGCCGGCAGCC | |
| | TGACAGGCCTGCTGCTGCTGCAGGCCGTGTCCTGGGCCAGTGGAGCCCGGCCCTGCA | |
| | TCCCTAAGTCCTTCGGCTATTCTAGCGTGGTCTGCGTGTGTAATGCCACTTACTGCG | |
| | ACAGCTTCGACCCTCCTACCTTCCCCGCCCTTGGAACATTCAGCAGATACGAGAGCA | |
| | CCAGAAGCGGCAGAAGAATGGAACTGAGCATGGGCCCAATCCAGGCCAACCACACCG | |
| | GCACCGGCCTGCTGCTGACACTGCAACCTGAGCAGAAGTTCCAGAAGGTGAAGGGAT | |
| | TTGGAGGCGCCATGACCGACGCTGCTGCTCTGAACATCCTGGCCCTCTCCCCACCTG | |
| | CTCAGAACCTGCTGCTTAAAAGCTACTTCAGCGAGGAAGGCATCGGCTATAACATCA | |
| | TCAGAGTGCCCATGGCCAGCTGCGACTTCAGCATCAGAACATACACCTACGCCGATA | |
| | CACCTGATGACTTCCAACTGCACAACTTCAGCCTGCCTGAAGAGGACACAAAGCTGA | |
| | AAATCCCCCTGATCCACCGGGCCCTGCAGCTGGCCCAGAGACCTGTGAGCCTGCTGG | |
| | CCTCTCCTTGGACAAGCCCCACCTGGCTGAAGACCAATGGAGCTGTGAACGGCAAGG | |
| | GCAGCCTGAAGGGCCAGCCCGGCGACATCTACCACCAAACCTGGGCTCGCTACTTCG | |
| | TGAAATTCCTGGACGCCTACGCTGAGCATAAGCTGCAATTTTGGGCCGTTACAGCCG | |
| | AGAACGAGCCTTCTGCCGGCCTGCTGTCTGGATATCCTTTCCAGTGCCTGGGCTTCA | |
| | CCCCTGAGCACCAGAGAGACTTTATCGCCAGAGATCTGGGGCCTACCCTGGCTAACA | |
| | GCACACACCACAACGTGCGGCTGCTGATGCTGGACGATCAGAGGCTGCTGCTCCCCC | |
| | ACTGGGCCAAGGTGGTGCTGACAGATCCGGAGGCCGCCAAATACGTGCACGGCATCG | |
| | CCGTCCACTGGTACCTGGATTTCCTGGCCCCTGCCAAGGCCACCCTGGGCGAGACAC | |
| | ATAGACTGTTTCCTAATACCATGCTGTTCGCCAGCGAGGCCTGCGTGGGCAGCAAGT | |
| | TCTGGGAACAGAGCGTGCGGCTGGGCAGCTGGGACAGAGGAATGCAGTACAGCCACA | |
| | GCATCATTACCAACCTGCTGTACCACGTGGTGGGCTGGACCGACTGGAACCTGGCCC | |
| | TGAACCCCGAAGGCGGCCCCAACTGGGTGCGGAACTTCGTGGACTCTCCTATCATCG | |
| | TGGATATTACCAAGGATACCTTTTACAAGCAGCCTATGTTCTACCACCTGGGCCACT | |
| | TCAGCAAGTTCATCCCTGAGGGCTCTCAGCGGGTGGGCCTGGTGGCCTCTCAGAAAA | |
| | ACGACCTGGATGCCGTTGCCCTGATGCACCCCGACGGCAGCGCCGTGGTGGTCGTCC | |
| | TGAATAGAAGCTCCAAGGACGTGCCTCTGACCATCAAGGACCCCGCTGTGGGATTTC | |
| | TGGAAACCATCAGCCCTGGCTACAGCATCCACACCTACCTGTGGCGGCGGCAGTAGT | |
| | AACCTCGAGGTACCAGGAGCTCTTCTCCTAGTGAATTCTACCAGTGCCATAGATAGT | |
| | TAAGTGAATTCTACCAGTGCCATAGATAGTTAAGTGAATTCTACCAGTGCCATAGAT | |
| | AGTTAAGTGAATTCTACCAGTGCCATACTGCAGTCAGGTCTATACCATCGAGGACGG | |
| | GGTGAACTACGCCTGAGGATCCgatctttttccctctgccaaaaattatggggacat | |
| | catgaagccccttgagcatctgacttctggctaataaaggaaatttattttcattgc | |
| | aatagtgtgttggaattttttgtgtctctcactcgGCCTAGGTAGATAAGTAGCATG | |
| | GCGGGTTAATCATTAACTACAaggaacccctagtgatggagttggccactccctctc | |
| | tgcgcgctcgctcgctcactgaggccgggcgaccaaaggtcgcccgacgcccgggct | |
| | ttgcccgggcggcctcagtgagcgagcgagcgcgcag | |

[0945] In some embodiments, the viral genome of an AAV particle described herein comprises a nucleotide sequence comprising the all of the components or a combination of the components as described, e.g., in Tables 20, 21, or 29-32, or a sequence having at least 70%, 75%, 80%, 85%, 90%, 95%, or 99% sequence identity to any of the aforesaid sequences.

TABLE 20
Sequence Regions in ITR to ITR Sequences

| | GBA_VG17 (SEQ ID NO: 1812) | | |
|---|---|---|---|
| | Region | Region | Position in |
| Sequence Regions | SEQ ID NO | length | SEQ ID NO: 1812 |
| 5′ ITR | 1829 | 130 | 1-130 |
| CMVie | 1831 | 380 | 204-583 |
| CB promoter | 1834 | 260 | 590-849 |
| Intron | 1842 | 566 | 877-1442 |
| Signal sequence | 1850 | 117 | 1467-1583 |
| GBA Variant 1 coding | 1773 | 1,491 | 1584-3074 |
| sequence | | | |
| PolyA | 1846 | 127 | 3114-3240 |
| 3′ ITR | 1830 | 130 | 3284-3413 |

[0946] In some embodiments the AAV particle comprises a viral genome comprising the nucleotide sequence of SEQ ID NO: 1812 (GBA_VG17), or a nucleotide sequence substantially identical (e.g., having at least 70%, 75%, 80%, 85%, 90%, 95%, 99% or 100%, sequence identity) thereto. In some embodiments, the viral genome comprises the nucleotide sequence of SEQ ID NO: 1812, or a sequence substantially identical (e.g., having at least 70%, 75%, 80%, 85%, 90%, 95%, or 99% sequence identity) thereto. In some embodiments, the viral genome comprising the nucleotide sequence of SEQ ID NO: 1812, comprises in 5′ to 3′ order: a 5′ ITR sequence region comprising the nucleotide sequence of SEQ ID NO: 1829, or a nucleotide sequence at least 95% identical thereto; a CMVie enhancer comprising the nucleotide sequence of SEQ ID NO: 1831, or a nucleotide sequence at least 95% identical thereto; a CB promoter comprising the nucleotide sequence of SEQ ID NO: 1834, or a nucleotide sequence at least 95% identical thereto; an intron comprising the nucleotide sequence of SEQ ID NO: 1842, or a nucleotide sequence at least 95% identical thereto; a nucleotide sequence encoding a signal sequence comprising the nucleotide sequence of SEQ ID NO: 1850, or a nucleotide sequence at least 95% identical thereto; a nucleotide sequence encoding a GBA protein comprising the nucleotide sequence of SEQ ID NO: 1773 or a nucleotide sequence at least 88% (e.g., at least 89, 90, 92, 95, 96, 97, 98, or 99%) identical to the nucleotide sequence of SEQ ID NO: 1773; a polyadenylation sequence comprising the nucleotide sequence of SEQ ID NO: 1846, or a nucleotide sequence at least 95% identical thereto; and a 3′ ITR sequence region comprising the nucleotide sequence of SEQ ID NO: 1830, or a nucleotide sequence at least 95% identical thereto.

[0947] In some embodiments, the viral genome comprising the nucleotide sequence of SEQ ID NO: 1812, or a nucleotide sequence substantially identical (e.g., having at least 70%, 75%, 80%, 85%, 90%, 95%, or 99% sequence identity) thereto, encodes a GBA protein comprising the amino acid sequence of SEQ ID NO: 1775, or an amino acid sequence substantially identical (e.g., having at least 70%, 75%, 80%, 85%, 90%, 95%, or 99% sequence identity) thereto.

TABLE 29
Sequence Regions in ITR to ITR Sequences

| | GBA_VG18 (SEQ ID NO: 1813) | | |
|---|---|---|---|
| | Region | Region | Position in |
| Sequence Regions | SEQ ID NO | length | SEQ ID NO: 1813 |
| 5′ ITR | 1829 | 130 | 1-130 |
| EF-1α promoter variant 2 | 1839 | 1189 | 216-1404 |
| Signal sequence | 1850 | 117 | 1429-1545 |
| GBA Variant 1 coding | 1773 | 1,491 | 1546-3063 |
| sequence | | | |
| PolyA | 1846 | 127 | 3076-3202 |
| 3′ ITR | 1830 | 130 | 3246-3375 |

[0948] In some embodiments the AAV particle comprises a viral genome comprising the nucleotide sequence of SEQ ID NO: 1813 (GBA_VG18), or a nucleotide sequence substantially identical (e.g., having at least 70%, 75%, 80%, 85%, 90%, 95%, 99% or 100%, sequence identity) thereto. In some embodiments, the viral genome comprises the nucleotide sequence of SEQ ID NO: 1813, or a sequence substantially identical (e.g., having at least 70%, 75%, 80%, 85%, 90%, 95%, or 99% sequence identity) thereto. In some embodiments, the viral genome comprising the nucleotide sequence of SEQ ID NO: 1813, comprises in 5′ to 3′ order: a 5′ ITR sequence region comprising the nucleotide sequence of SEQ ID NO: 1829, or a nucleotide sequence at least 95% identical thereto; an EF-1α promoter variant comprising the nucleotide sequence of SEQ ID NO: 1839, or a nucleotide sequence at least 95% identical thereto; a nucleotide sequence encoding a signal sequence comprising the nucleotide sequence of SEQ ID NO: 1850, or a nucleotide sequence at least 95% identical thereto; a nucleotide sequence encoding a GBA protein comprising the nucleotide sequence of SEQ ID NO: 1773 or a nucleotide sequence at least 88% (e.g., at least 89, 90, 92, 95, 96, 97, 98, or 99%) identical to the nucleotide sequence of SEQ ID NO: 1773; a polyadenylation sequence comprising the nucleotide sequence of SEQ ID NO: 1846, or a nucleotide sequence at least 95% identical thereto; and a 3′ ITR sequence region comprising the nucleotide sequence of SEQ ID NO: 1830, or a nucleotide sequence at least 95% identical thereto.

[0949] In some embodiments, the viral genome comprising the nucleotide sequence of SEQ ID NO: 1813, or a nucleotide sequence substantially identical (e.g., having at least 70%, 75%, 80%, 85%, 90%, 95%, or 99% sequence identity) thereto, encodes a GBA protein comprising the amino acid sequence of SEQ ID NO: 1775, or an amino acid sequence substantially identical (e.g., having at least 70%, 75%, 80%, 85%, 90%, 95%, or 99% sequence identity) thereto.

TABLE 30
Sequence Regions in ITR to ITR Sequences

| | GBA_VG27 (SEQ ID NO: 1822) | | |
|---|---|---|---|
| | Region | Region | Position in |
| Sequence Regions | SEQ ID NO | length | SEQ ID NO: 1822 |
| 5′ ITR | 1829 | 130 | 1-130 |
| CMVie | 1831 | 380 | 204-583 |
| CB promoter | 1834 | 260 | 590-849 |
| Intron | 1842 | 566 | 877-1442 |
| Signal sequence | 1850 | 117 | 1467-1583 |
| GBA Variant 1 coding | 1773 | 1,491 | 1584-3074 |
| sequence | | | |
| Furin cleavage site | 1724 | 12 | 3075-3086 |
| T2A | 1726 | 54 | 3087-3140 |
| Signal sequence | 1856 | 48 | 3141-3188 |
| SAPC coding sequence | 1787 | 351 | 3189-3539 |
| PolyA | 1846 | 127 | 3579-3705 |
| 3′ ITR | 1830 | 130 | 3749-3878 |

[0950] In some embodiments the AAV particle comprises a viral genome comprising the nucleotide sequence of SEQ ID NO: 1822 (GBA_VG27), or a nucleotide sequence substantially identical (e.g., having at least 70%, 75%, 80%, 85%, 90%, 95%, 99% or 100%, sequence identity) thereto. In some embodiments, the viral genome comprises the nucleotide sequence of SEQ ID NO: 1822, or a sequence substantially identical (e.g., having at least 70%, 75%, 80%, 85%, 90%, 95%, or 99% sequence identity) thereto. In some embodiments, the viral genome comprising the nucleotide sequence of SEQ ID NO: 1822, comprises in 5′ to 3′ order: a 5′ ITR sequence region comprising the nucleotide sequence of SEQ ID NO: 1829, or a nucleotide sequence at least 95% identical thereto; a CMVie enhancer comprising the nucleotide sequence of SEQ ID NO: 1831, or a nucleotide sequence at least 95% identical thereto; a CB promoter comprising the nucleotide sequence of SEQ ID NO: 1834, or a nucleotide sequence at least 95% identical thereto; an intron comprising the nucleotide sequence of SEQ ID NO: 1842, or a nucleotide sequence at least 95% identical thereto; a nucleotide sequence encoding a first signal sequence comprising the nucleotide sequence of SEQ ID NO: 1850, or a nucleotide sequence at least 95% identical thereto; a nucleotide sequence encoding a GBA protein comprising the nucleotide sequence of SEQ ID NO: 1773 or a nucleotide sequence at least 88% (e.g., at least 89, 90, 92, 95, 96, 97, 98, or 99%) identical to the nucleotide sequence of SEQ ID NO: 1773; a nucleotide sequence encoding a furin cleavage site comprising the nucleotide sequence of SEQ ID NO: 1724, or a nucleotide sequence having at least one, two, or three but no more than four modifications, e.g., substitutions, relative to SEQ ID NO: 1724; a nucleotide sequence encoding a T2A polypeptide comprising the nucleotide sequence of SEQ ID NO: 1726, or a nucleotide sequence having at least one, two, or three but no more than four modifications, e.g., substitutions, relative to SEQ ID NO: 1726; a nucleotide sequence encoding a second signal sequence comprising the nucleotide sequence of SEQ ID NO: 1856, or a nucleotide sequence at least 85% (e.g., at least 90%, 92%, 95%, 97%, 98%, or 99%) identical thereto; a nucleotide sequence encoding a SAPC polypeptide comprising the nucleotide sequence of SEQ ID NO: 1787, or a nucleotide sequence at least 85% (e.g., at least 90%, 92%, 95%, 97%, 98%, or 99%) identical thereto; a polyadenylation sequence comprising the nucleotide sequence of SEQ ID NO: 1846, or a nucleotide sequence at least 95% identical thereto; and a 3′ ITR sequence region comprising the nucleotide sequence of SEQ ID NO: 1830, or a nucleotide sequence at least 95% identical thereto.

[0951] In some embodiments, the viral genome comprising the nucleotide sequence of SEQ ID NO: 1822, or a nucleotide sequence substantially identical (e.g., having at least 70%, 75%, 80%, 85%, 90%, 95%, or 99% sequence identity) thereto, encodes a GBA protein comprising the amino acid sequence of SEQ ID NO: 1775, or an amino acid sequence substantially identical (e.g., having at least 70%, 75%, 80%, 85%, 90%, 95%, or 99% sequence identity) thereto. In some embodiments, the viral genome comprising the nucleotide sequence of SEQ ID NO: 1822, or a nucleotide sequence substantially identical (e.g., having at least 70%, 75%, 80%, 85%, 90%, 95%, or 99% sequence identity) thereto, encodes a SAPC protein comprising the amino acid sequence of SEQ ID NO: 1789, or an amino acid sequence at least 85% (e.g., at least 90%, 92%, 95%, 96%, 97%, 98%, or 99%) identical thereto.

TABLE 31
Sequence Regions in ITR to ITR Sequences

| | GBA_VG29 (SEQ ID NO: 1824) | | |
|---|---|---|---|
| | Region | Region | Position in |
| Sequence Regions | SEQ ID NO | length | SEQ ID NO: 1824 |
| 5′ ITR | 1829 | 130 | 1-130 |
| CMVie | 1831 | 380 | 204-583 |
| CB promoter | 1834 | 260 | 590-849 |
| Intron | 1842 | 566 | 877-1442 |
| Signal sequence | 1850 | 117 | 1467-1583 |
| Lysosomal targeting | 1801 | 63 | 1584-1646 |
| sequence 2 (LTS2) | | | |
| GBA Variant 1 coding | 1773 | 1,491 | 1647-3137 |
| sequence | | | |
| PolyA | 1846 | 127 | 3177-3303 |
| 3′ ITR | 1830 | 130 | 3347-3476 |

[0952] In some embodiments the AAV particle comprises a viral genome comprising the nucleotide sequence of SEQ ID NO: 1824 (GBA_VG29), or a nucleotide sequence substantially identical (e.g., having at least 70%, 75%, 80%, 85%, 90%, 95%, 99% or 100%, sequence identity) thereto. In some embodiments, the viral genome comprises the nucleotide sequence of SEQ ID NO: 1824, or a sequence substantially identical (e.g., having at least 70%, 75%, 80%, 85%, 90%, 95%, or 99% sequence identity) thereto. In some embodiments, the viral genome comprising the nucleotide sequence of SEQ ID NO: 1824, comprises in 5′ to 3′ order: a 5′ ITR sequence region comprising the nucleotide sequence of SEQ ID NO: 1829, or a nucleotide sequence at least 95% identical thereto; a CMVie enhancer comprising the nucleotide sequence of SEQ ID NO: 1831, or a nucleotide sequence at least 95% identical thereto; a CB promoter comprising the nucleotide sequence of SEQ ID NO: 1834, or a nucleotide sequence at least 95% identical thereto; an intron comprising the nucleotide sequence of SEQ ID NO: 1842, or a nucleotide sequence at least 95% identical thereto; a nucleotide sequence encoding a signal sequence comprising the nucleotide sequence of SEQ ID NO: 1850, or a nucleotide sequence at least 95% identical thereto; a lysosomal targeting sequence 2 (LTS2) comprising the nucleotide sequence of SEQ ID NO: 1801, or a nucleotide sequence at least 85% (e.g., at least 90%, 92%, 95%, 96%, 97%, 98%, or 99%) identical thereto; a nucleotide sequence encoding a GBA protein comprising the nucleotide sequence of SEQ ID NO: 1773 or a nucleotide sequence at least 88% (e.g., at least 89, 90, 92, 95, 96, 97, 98, or 99%) identical to the nucleotide sequence of SEQ ID NO: 1773; a polyadenylation sequence comprising the nucleotide sequence of SEQ ID NO: 1846, or a nucleotide sequence at least 95% identical thereto; and a 3′ ITR sequence region comprising the nucleotide sequence of SEQ ID NO: 1830, or a nucleotide sequence at least 95% identical thereto.

[0953] In some embodiments, the viral genome comprising the nucleotide sequence of SEQ ID NO: 1824, or a nucleotide sequence substantially identical (e.g., having at least 70%, 75%, 80%, 85%, 90%, 95%, or 99% sequence identity) thereto, encodes a GBA protein comprising the amino acid sequence of SEQ ID NO: 1775, or an amino acid sequence substantially identical (e.g., having at least 70%, 75%, 80%, 85%, 90%, 95%, or 99% sequence identity) thereto.

TABLE 32
Sequence Regions in ITR to ITR Sequences

| | GBA_VG32 (SEQ ID NO: 1827) | | |
|---|---|---|---|
| | Region | Region | Position in |
| Sequence Regions | SEQ ID NO | length | SEQ ID NO: 1827 |
| 5′ ITR | 1829 | 130 | 1-130 |
| CMVie | 1831 | 380 | 204-583 |
| CB promoter | 1834 | 260 | 590-849 |
| Intron | 1842 | 566 | 877-1442 |
| Signal sequence | 1850 | 117 | 1467-1583 |
| GBA Variant 1 coding | 1773 | 1,491 | 1584-3074 |
| sequence | | | |
| G4S3 linker | 1730 | 45 | 3075-3119 |
| TAT coding sequence | 1793 | 42 | 3120-3161 |
| PolyA | 1846 | 127 | 3201-3327 |
| 3′ ITR | 1830 | 130 | 3371-3500 |

[0954] In some embodiments the AAV particle comprises a viral genome comprising the nucleotide sequence of SEQ ID NO: 1827 (GBA_VG32), or a nucleotide sequence substantially identical (e.g., having at least 70%, 75%, 80%, 85%, 90%, 95%, 99% or 100%, sequence identity) thereto. In some embodiments, the viral genome comprises the nucleotide sequence of SEQ ID NO: 1827, or a sequence substantially identical (e.g., having at least 70%, 75%, 80%, 85%, 90%, 95%, or 99% sequence identity) thereto. In some embodiments, the viral genome comprising the nucleotide sequence of SEQ ID NO: 1827, comprises in 5′ to 3′ order: a 5′ ITR sequence region comprising the nucleotide sequence of SEQ ID NO: 1829, or a nucleotide sequence at least 95% identical thereto; a CMVie enhancer comprising the nucleotide sequence of SEQ ID NO: 1831, or a nucleotide sequence at least 95% identical thereto; a CB promoter comprising the nucleotide sequence of SEQ ID NO: 1834, or a nucleotide sequence at least 95% identical thereto; an intron comprising the nucleotide sequence of SEQ ID NO: 1842, or a nucleotide sequence at least 95% identical thereto; a nucleotide sequence encoding a signal sequence comprising the nucleotide sequence of SEQ ID NO: 1850, or a nucleotide sequence at least 95% identical thereto; a nucleotide sequence encoding a GBA protein comprising the nucleotide sequence of SEQ ID NO: 1773 or a nucleotide sequence at least 88% (e.g., at least 89, 90, 92, 95, 96, 97, 98, or 99%) identical to the nucleotide sequence of SEQ ID NO: 1773; a nucleotide sequence encoding a G4S3 linker comprising the nucleotide sequence of SEQ ID NO: 1730, or a nucleotide sequence at least 85% (e.g., at least 90%, 92%, 95%, 96%, 97%, 98%, or 99%) identical thereto; a nucleotide sequence encoding a TAT peptide comprising the nucleotide sequence of SEQ ID NO: 1793, or a nucleotide sequence at least 85% (e.g., at least 90%, 92%, 95%, 96%, 97%, 98%, or 99%) identical thereto; a polyadenylation sequence comprising the nucleotide sequence of SEQ ID NO: 1846, or a nucleotide sequence at least 95% identical thereto; and a 3′ ITR sequence region comprising the nucleotide sequence of SEQ ID NO: 1830, or a nucleotide sequence at least 95% identical thereto.

[0955] In some embodiments, the viral genome comprising the nucleotide sequence of SEQ ID NO: 1827, or a nucleotide sequence substantially identical (e.g., having at least 70%, 75%, 80%, 85%, 90%, 95%, or 99% sequence identity) thereto, encodes a GBA protein comprising the amino acid sequence of SEQ ID NO: 1775, or an amino acid sequence substantially identical (e.g., having at least 70%, 75%, 80%, 85%, 90%, 95%, or 99% sequence identity) thereto. In some embodiments, the viral genome comprising the nucleotide sequence of SEQ ID NO: 1827, or a nucleotide sequence substantially identical (e.g., having at least 70%, 75%, 80%, 85%, 90%, 95%, or 99% sequence identity) thereto, encodes a TAT peptide comprising the amino acid sequence of SEQ ID NO: 1794, or an amino acid sequence having at least one, two, or three but no more than four modifications, e.g., substitutions, relative to SEQ ID NO: 1794.

TABLE 21
Sequence Regions in ITR to ITR Sequences

| | GBA_VG33 (SEQ ID NO: 1828) | | |
|---|---|---|---|
| | Region SEQ | | Position in |
| | ID NO | Region | SEQ ID |
| Sequence Regions | or Sequence | length | NO: 1828 |
| 5′ ITR | 1829 | 130 | 1-130 |
| CMVie | 1831 | 380 | 204-583 |
| CB promoter | 1834 | 260 | 590-849 |
| Intron | 1842 | 566 | 877-1442 |
| Signal sequence | 1850 | 117 | 1467-1583 |
| GBA Variant 1 | 1773 | 1,491 | 1584-3074 |
| coding sequence | | | |
| miR183 binding site | 1847 | 22 | 3108-3129 |
| Spacer | GATAGTTA | 8 | 3130-3137 |
| miR183 binding site | 1847 | 22 | 3138-3159 |
| Spacer | GATAGTTA | 8 | 3160-3167 |
| miR183 binding site | 1847 | 22 | 3168-3189 |
| Spacer | GATAGTTA | 8 | 3190-3197 |
| miR183 binding site | 1847 | 22 | 3198-3219 |
| PolyA | 1846 | 127 | 3272-3398 |
| 3′ ITR | 1830 | 130 | 3442-3751 |

[0956] In some embodiments, the AAV particle comprises a viral genome comprising the nucleotide sequence of SEQ ID NO: 1828 (GBA_VG33), or a nucleotide sequence substantially identical (e.g., having at least 70%, 75%, 80%, 85%, 90%, 95%, 99% or 100%, sequence identity) thereto. In some embodiments, the viral genome comprises the nucleotide sequence of SEQ ID NO: 1828, or a sequence substantially identical (e.g., having at least 70%, 75%, 80%, 85%, 90%, 95%, or 99% sequence identity) thereto. In some embodiments, the viral genome comprising the nucleotide sequence of SEQ ID NO: 1828, comprises in 5′ to 3′ order: a 5′ ITR sequence region comprising the nucleotide sequence of SEQ ID NO: 1829, or a nucleotide sequence at least 95% identical thereto; a CMVie enhancer comprising the nucleotide sequence of SEQ ID NO: 1831, or a nucleotide sequence at least 95% identical thereto; a CB promoter comprising the nucleotide sequence of SEQ ID NO: 1834, or a nucleotide sequence at least 95% identical thereto; an intron comprising the nucleotide sequence of SEQ ID NO: 1842, or a nucleotide sequence at least 95% identical thereto; a nucleotide sequence encoding a signal sequence comprising the nucleotide sequence of SEQ ID NO: 1850, or a nucleotide sequence at least 95% identical thereto; a nucleotide sequence encoding a GBA protein comprising the nucleotide sequence of SEQ ID NO: 1773 or a nucleotide sequence at least 88% (e.g., at least 89, 90, 92, 95, 96, 97, 98, or 99%) identical to the nucleotide sequence of SEQ ID NO: 1773; a nucleotide sequence encoding a miR183 binding site comprising the nucleotide sequence of SEQ ID NO: 1847, or a nucleotide sequence having at least one, two, three, four, five, six, or seven modifications, but no more than ten modifications of SEQ ID NO: 1847; a spacer comprising the nucleotide sequence of GATAGTTA, or a nucleotide sequence having at least one, two, or three modifications, but no more than four modifications of GATAGTTA; a nucleotide sequence encoding a miR183 binding site comprising the nucleotide sequence of SEQ ID NO: 1847, or a nucleotide sequence having at least one, two, three, four, five, six, or seven modifications, but no more than ten modifications of SEQ ID NO: 1847; a spacer comprising the nucleotide sequence of GATAGTTA, or a nucleotide sequence having at least one, two, or three modifications, but no more than four modifications of GATAGTTA; a nucleotide sequence encoding a miR183 binding site comprising the nucleotide sequence of SEQ ID NO: 1847, or a nucleotide sequence having at least one, two, three, four, five, six, or seven modifications, but no more than ten modifications of SEQ ID NO: 1847; a spacer comprising the nucleotide sequence of GATAGTA, or a nucleotide sequence having at least one, two, or three modifications, but no more than four modifications of GATAGTTA; a nucleotide sequence encoding a miR183 binding site comprising the nucleotide sequence of SEQ ID NO: 1847, or a nucleotide sequence having at least one, two, three, four, five, six, or seven modifications, but no more than ten modifications of SEQ ID NO: 1847; a polyadenylation sequence comprising the nucleotide sequence of SEQ ID NO: 1846, or a nucleotide sequence at least 95% identical thereto; and a 3′ ITR sequence region comprising the nucleotide sequence of SEQ ID NO: 1830, or a nucleotide sequence at least 95% identical thereto.

[0957] In some embodiments, the viral genome comprising the nucleotide sequence of SEQ ID NO: 1828, or a nucleotide sequence substantially identical (e.g., having at least 70%, 75%, 80%, 85%, 90%, 95%, or 99% sequence identity) thereto, encodes a GBA protein comprising the amino acid sequence of SEQ ID NO: 1775, or an amino acid sequence substantially identical (e.g., having at least 70%, 75%, 80%, 85%, 90%, 95%, or 99% sequence identity) thereto

[0958] In some embodiments, the AAV particle comprises an AAV viral genome comprising the nucleotide sequence of any of the viral genomes described herein, e.g., as described in Tables 18-21 or 29-32, or a nucleotide sequence substantially identical (e.g., having at least about 70%, 75%, 80%, 85%, 90%, 92%, 95%, 97%, 98%, or 99% sequence identity) to any of the aforesaid sequences. In some embodiments, the AAV viral genome further comprises a nucleic acid encoding a capsid protein, e.g., a structural protein. In some embodiments, the capsid protein comprises a VP1 polypeptide, a VP2 polypeptide, and/or a VP3 polypeptide. In some embodiments, the VP1 polypeptide, the VP2 polypeptide, and/or the VP3 polypeptide are encoded by at least one Cap gene. In some embodiments, the AAV viral genome further comprises a nucleic acid encoding a Rep protein, e.g., a non-structural protein. In some embodiments, the Rep protein comprises a Rep78 protein, a Rep68, Rep52 protein, and/or a Rep40 protein. In some embodiments, the Rep78 protein, the Rep68 protein, the Rep52 protein, and/or the Rep40 protein are encoded by at least one Rep gene.

[0959] In some embodiment, the AAV particle comprising a viral comprising the nucleotide sequence of any of the viral genomes described herein, e.g., as described in Tables 18-21 or 29-32, or a nucleotide sequence substantially identical (e.g., having at least about 70%, 75%, 80%, 85%, 90%, 92%, 95%, 97%, 98%, or 99% sequence identity) to any of the aforesaid sequences comprises, e.g., is packaged in, a capsid protein having a serotype or a functional variant thereof selected from Table 1. In some embodiments, the capsid protein comprise a VOY101, VOY201, AAVPHP.N (PHP.N), AAVPHP.B (PHP.B), AAVPHP.A (PHP.A), PHP.B2, PHP.B3, G2B4, G2B5, AAV9, AAVrh10, or a functional variant thereof. In some embodiments, the capsid protein comprises a VOY101 capsid protein, or functional variant thereof.

[0960] In some embodiments, the AAV particle comprising a viral genome comprising the nucleotide sequence of any of the viral genomes described herein, e.g., as described in Tables 18-21 or 29-32, or a nucleotide sequence substantially identical (e.g., having at least about 70%, 75%, 80%, 85%, 90%, 92%, 95%, 97%, 98%, or 99% sequence identity) to any of the aforesaid sequences comprises a capsid protein comprising the amino acid sequence of SEQ ID NO: 138, or a sequence substantially identical (e.g., having at least about 70%, 75%, 80%, 85%, 90%, 92%, 95%, 97%, 98%, or 99% sequence identity) thereto. In some embodiments, the capsid protein comprises an amino acid sequence having at least one, two or three modifications, but not more than 30, 20 or 10 modifications of the amino acid sequence of SEQ ID NO: 138. In some embodiments, the capsid protein is encoded by the nucleotide sequence of SEQ ID NO: 137, or a nucleotide sequence substantially identical (e.g., having at least 70%, 75%, 80%, 85%, 90%, 95% or 99%) thereto. In some embodiments, the capsid protein comprises an amino acid substitution at position K449, e.g., a K449R substitution, numbered according to SEQ ID NO:138. In some embodiments, the capsid protein comprises an insert comprising the amino acid sequence of TLAVPFK (SEQ ID NO: 1262), wherein the insert is present immediately subsequent to position 588, relative to a reference sequence numbered according to SEQ ID NO:138. In some embodiments, the capsid protein comprises an amino acid other than “A” at position 587 and/or an amino acid other than “Q” at position 588, numbered according to SEQ ID NO:138. In some embodiments, the capsid protein comprises the amino acid substitution of A587D and/or Q588G, numbered according to SEQ ID NO:138.

[0961] In some embodiments, the AAV particle comprising a viral genome comprising the nucleotide sequence of any of the viral genomes described herein, e.g., as described in Tables 18-21 or 29-32, or a nucleotide sequence substantially identical (e.g., having at least about 70%, 75%, 80%, 85%, 90%, 92%, 95%, 97%, 98%, or 99% sequence identity) to any of the aforesaid sequences comprises a capsid protein comprising the amino acid sequence of SEQ ID NO: 1, or a sequence substantially identical (e.g., having at least about 70%, 75%, 80%, 85%, 90%, 92%, 95%, 97%, 98%, or 99% sequence identity) thereto. In some embodiments, the capsid protein comprises an amino acid sequence having at least one, two or three modifications, but not more than 30, 20 or 10 modifications of the amino acid sequence of SEQ ID NO: 1. In some embodiments, the capsid protein is encoded by the nucleotide sequence of SEQ ID NO: 2, or a nucleotide sequence substantially identical (e.g., having at least 70%, 75%, 80%, 85%, 90%, 95% or 99%) thereto.

[0962] The present disclosure provides in some embodiments, vectors, cells, and/or AAV particles comprising the above identified viral genomes.

### Self-Complementary and Single Strand Vectors

[0963] In some embodiments, the AAV vector used in the present disclosure is a single strand vector (ssAAV).

[0964] In some embodiments, the AAV vectors may be self-complementary AAV vectors (scAAVs). See, e.g., U.S. Pat. No. 7,465,583. scAAV vectors contain both DNA strands that anneal together to form double stranded DNA. By skipping second strand synthesis, scAAVs allow for rapid expression in the cell.

[0965] In some embodiments, the AAV vector used in the present disclosure is a scAAV.

[0966] Methods for producing and/or modifying AAV vectors are disclosed in the art such as pseudotyped AAV vectors (International Patent Publication Nos. WO200028004; WO200123001; WO2004112727; WO 2005005610 and WO 2005072364, the content of each of which are incorporated herein by reference in their entirety).

### Viral Genome Size

[0967] In some embodiments, the viral genome of the AAV particles of the present disclosure may be single or double stranded. The size of the vector genome may be small, medium, large or the maximum size.

[0968] In some embodiments, the vector genome, which comprises a nucleic acid sequence encoding GCase protein described herein, may be a small single stranded vector genome. A small single stranded vector genome may be about 2.7 kb to about 3.5 kb in size such as about 2.7, about 2.8, about 2.9, about 3.0, about 3.1, about 3.2, about 3.3, about 3.4, or about 3.5 kb in size. In some embodiments, the small single stranded vector genome may be 3.2 kb in size.

[0969] In some embodiments, the vector genome, which comprises a nucleic acid sequence encoding GCase protein described herein, may be a small double stranded vector genome. A small double stranded vector genome may be about 1.3 to about 1.7 kb in size such as about 1.3, about 1.4, about 1.5, about 1.6, or about 1.7 kb in size. In some embodiments, the small double stranded vector genome may be 1.6 kb in size.

[0970] In some embodiments, the vector genome, which comprises a nucleic acid sequence encoding GCase protein described herein, may be a medium single stranded vector genome. A medium single stranded vector genome may be about 3.6 to about 4.3 kb in size such as about 3.6, about 3.7, about 3.8, about 3.9, about 4.0, about 4.1, about 4.2, or about 4.3 kb in size. In some embodiments, the medium single stranded vector genome may be 4.0 kb in size.

[0971] In some embodiments, the vector genome, which comprises a nucleic acid sequence encoding GCase protein described herein, may be a medium double stranded vector genome. A medium double stranded vector genome may be about 1.8 to about 2.1 kb in size such as about 1.8, about 1.9, about 2.0, or about 2.1 kb in size. In some embodiments, the medium double stranded vector genome may be 2.0 kb in size. Additionally, the vector genome may comprise a promoter and a polyA tail.

[0972] In some embodiments, the vector genome which comprises a nucleic acid sequence encoding GCase protein described herein may be a large single stranded vector genome. A large single stranded vector genome may be 4.4 to 6.0 kb in size such as about 4.4, 4.5, 4.6, 4.7, 4.8, 4.9, 5.0, 5.1, 5.2, 5.3, 5.4, 5.5, 5.6, 5.7, 5.8, 5.9 and 6.0 kb in size. As a non-limiting example, the large single stranded vector genome may be 4.7 kb in size. As another non-limiting example, the large single stranded vector genome may be 4.8 kb in size. As yet another non-limiting example, the large single stranded vector genome may be 6.0 kb in size.

[0973] In some embodiments, the vector genome which comprises a nucleic acid sequence encoding GCase protein described herein may be a large double stranded vector genome. A large double stranded vector genome may be 2.2 to 3.0 kb in size such as about 2.2, 2.3, 2.4, 2.5, 2.6, 2.7, 2.8, 2.9 and 3.0 kb in size. As a non-limiting example, the large double stranded vector genome may be 2.4 kb in size.

### Backbone

[0974] In certain embodiments, a cis-element such as a vector backbone is incorporated into the viral particle encoding, e.g., a GBA protein or a GBA protein and an enhancement element described herein. Without wishing to be bound by theory, it is believed, in some embodiments, the backbone sequence may contribute to the stability of GBA protein expression, and/or the level of expression of the GBA protein.

[0975] The present disclosure also provides in some embodiments, a nucleic acid encoding a viral genome, e.g., a viral genome comprising the nucleotide sequence of any of the viral genomes in Tables 18-21 or 29-32, or a nucleotide sequence substantially identical (e.g., having at least 70%, 75%, 80%, 85%, 90%, 95%, 99% or 100%, sequence identity) thereto, an a backbone region suitable for replication of the viral genome in a cell, e.g., a bacterial cell (e.g., wherein the backbone region comprises one or both of a bacterial origin of replication and a selectable marker).

### II. Viral Production

### General Viral Production Process

[0976] Cells for the production of AAV, e.g., rAAV, particles may comprise, in some embodiments, mammalian cells (such as HEK293 cells) and/or insect cells (such as Sf9 cells).

[0977] In various embodiments, AAV production includes processes and methods for producing AAV particles and vectors which can contact a target cell to deliver a payload, e.g. a recombinant viral construct, which includes a nucleotide encoding a payload molecule. In certain embodiments, the viral vectors are adeno-associated viral (AAV) vectors such as recombinant adeno-associated viral (rAAV) vectors. In certain embodiments, the AAV particles are adeno-associated viral (AAV) particles such as recombinant adeno-associated viral (rAAV) particles.

[0978] In some embodiments, disclosed herein is a vector comprising a viral genome of the present disclosure. In some embodiments, disclosed herein is a cell comprising a viral genome of the present disclosure. In some embodiments, the cell is a bacterial cell, a mammalian cell (e.g., a HEK293 cell), or an insect cell (e.g., an Sf9 cell).

[0979] In some embodiments, disclosed herein is a method of making a viral genome. The method comprising providing a nucleic acid encoding a viral genome described herein and a backbone region suitable for replication of the viral genome in a cell, e.g., a bacterial cell (e.g., wherein the backbone region comprises one or both of a bacterial origin of replication and a selectable marker), and excising the viral genome from the backbone region, e.g., by cleaving the nucleic acid molecule at upstream and downstream of the viral genome. In some embodiments, the viral genome comprising a promoter operably linked to nucleic acid comprising a transgene encoding a GBA protein (e.g., a GBA protein described herein), will be incorporated into an AAV particle produced in the cell. In some embodiments, the cell is a bacterial cell, a mammalian cell (e.g., a HEK293 cell), or an insect cell (e.g., an Sf9 cell).

[0980] In some embodiments, disclosed herein is a method of making a recombinant AAV particle of the present disclosure, the method comprising (i) providing a host cell comprising a viral genome described herein and incubating the host cell under conditions suitable to enclose the viral genome in a capsid protein, e.g., a capsid protein described herein (e.g., a capsid protein listed in Table 1, e.g., a VOY101 capsid protein or functional variant thereof), thereby making the recombinant AAV particle. In some embodiments, the method comprises prior to step (i), introducing a first nucleic acid comprising the viral genome into a cell. In some embodiments, the host cell comprises a second nucleic acid encoding the capsid protein. In some embodiments, the second nucleic acid is introduced into the host cell prior to, concurrently with, or after the first nucleic acid molecule. In some embodiments, the host cell is a bacterial cell, a mammalian cell (e.g., a HEK293 cell), or an insect cell (e.g., an Sf9 cell).

[0981] In various embodiments, methods are provided herein of producing AAV particles or vectors by (a) contacting a viral production cell with one or more viral expression constructs encoding at least one AAV capsid protein, and one or more payload constructs encoding a payload molecule, which can be selected from: a transgene, a polynucleotide encoding protein, and a modulatory nucleic acid; (b) culturing the viral production cell under conditions such that at least one AAV particle or vector is produced, and (c) isolating the AAV particle or vector from the production stream.

[0982] In these methods, a viral expression construct may encode at least one structural protein and/or at least one non-structural protein. The structural protein may include any of the native or wild type capsid proteins VP1, VP2, and/or VP3, or a chimeric protein thereof. The non-structural protein may include any of the native or wild type Rep78, Rep68, Rep52, and/or Rep40 proteins or a chimeric protein thereof.

[0983] In certain embodiments, contacting occurs via transient transfection, viral transduction, and/or electroporation.

[0984] In certain embodiments, the viral production cell is selected from a mammalian cell and an insect cell. In certain embodiments, the insect cell includes a Spodoptera frugiperda insect cell. In certain embodiments, the insect cell includes a Sf9 insect cell. In certain embodiments, the insect cell includes a Sf21 insect cell.

[0985] The payload construct vector of the present disclosure may include, in various embodiments, at least one inverted terminal repeat (ITR) and may include mammalian DNA.

[0986] Also provided are AAV particles and viral vectors produced according to the methods described herein.

[0987] In various embodiments, the AAV particles of the present disclosure may be formulated as a pharmaceutical composition with one or more acceptable excipients.

[0988] In certain embodiments, an AAV particle or viral vector may be produced by a method described herein.

[0989] In certain embodiments, the AAV particles may be produced by contacting a viral production cell (e.g., an insect cell or a mammalian cell) with at least one viral expression construct encoding at least one capsid protein and at least one payload construct vector. The viral production cell may be contacted by transient transfection, viral transduction, and/or electroporation. The payload construct vector may include a payload construct encoding a payload molecule such as, but not limited to, a transgene, a polynucleotide encoding protein, and a modulatory nucleic acid. The viral production cell can be cultured under conditions such that at least one AAV particle or vector is produced, isolated (e.g., using temperature-induced lysis, mechanical lysis and/or chemical lysis) and/or purified (e.g., using filtration, chromatography, and/or immunoaffinity purification). As a non-limiting example, the payload construct vector may include mammalian DNA.

[0990] In certain embodiments, the AAV particles are produced in an insect cell (e.g., Spodoptera frugiperda (Sf9) cell) using a method described herein. As a non-limiting example, the insect cell is contacted using viral transduction which may include baculoviral transduction.

[0991] In certain embodiments, the AAV particles are produced in an mammalian cell (e.g., HEK293 cell) using a method described herein. As a non-limiting example, the mammalian cell is contacted using viral transduction which may include multiplasmid transient transfection (such as triple plasmid transient transfection).

[0992] In certain embodiments, the AAV particle production method described herein produces greater than 10¹, greater than 10², greater than 10³, greater than 10⁴, or greater than 10⁵ AAV particles in a viral production cell.

[0993] In certain embodiments, a process of the present disclosure includes production of viral particles in a viral production cell using a viral production system which includes at least one viral expression construct and at least one payload construct. The at least one viral expression construct and at least one payload construct can be co-transfected (e.g. dual transfection, triple transfection) into a viral production cell. The transfection is completed using standard molecular biology techniques known and routinely performed by a person skilled in the art. The viral production cell provides the cellular machinery necessary for expression of the proteins and other biomaterials necessary for producing the AAV particles, including Rep proteins which replicate the payload construct and Cap proteins which assemble to form a capsid that encloses the replicated payload constructs. The resulting AAV particle is extracted from the viral production cells and processed into a pharmaceutical preparation for administration.

[0994] In various embodiments, once administered, an AAV particle disclosed herein may, without being bound by theory, contact a target cell and enter the cell, e.g., in an endosome. The AAV particles, e.g., those released from the endosome, may subsequently contact the nucleus of the target cell to deliver the payload construct. The payload construct, e.g. recombinant viral construct, may be delivered to the nucleus of the target cell wherein the payload molecule encoded by the payload construct may be expressed.

[0995] In certain embodiments, the process for production of viral particles utilizes seed cultures of viral production cells that include one or more baculoviruses (e.g., a Baculoviral Expression Vector (BEV) or a baculovirus infected insect cell (BIIC) that has been transfected with a viral expression construct and a payload construct vector). In certain embodiments, the seed cultures are harvested, divided into aliquots and frozen, and may be used at a later time point to initiate an infection of a naïve population of production cells.

[0996] In some embodiments, large scale production of AAV particles utilizes a bioreactor. Without being bound by theory, the use of a bioreactor may allow for the precise measurement and/or control of variables that support the growth and activity of viral production cells such as mass, temperature, mixing conditions (impellor RPM or wave oscillation), CO₂ concentration, O₂ concentration, gas sparge rates and volumes, gas overlay rates and volumes, pH, Viable Cell Density (VCD), cell viability, cell diameter, and/or optical density (OD). In certain embodiments, the bioreactor is used for batch production in which the entire culture is harvested at an experimentally determined time point and AAV particles are purified. In some embodiments, the bioreactor is used for continuous production in which a portion of the culture is harvested at an experimentally determined time point for purification of AAV particles, and the remaining culture in the bioreactor is refreshed with additional growth media components.

[0997] In various embodiments, AAV viral particles can be extracted from viral production cells in a process which includes cell lysis, clarification, sterilization and purification. Cell lysis includes any process that disrupts the structure of the viral production cell, thereby releasing AAV particles. In certain embodiments, cell lysis may include thermal shock, chemical, or mechanical lysis methods. Clarification can include the gross purification of the mixture of lysed cells, media components, and AAV particles. In certain embodiments, clarification includes centrifugation and/or filtration, including but not limited to depth end, tangential flow, and/or hollow fiber filtration.

[0998] In various embodiments, the end result of viral production is a purified collection of AAV particles which include two components: (1) a payload construct (e.g. a recombinant AAV vector genome construct) and (2) a viral capsid.

[0999] In certain embodiments, a viral production system or process of the present disclosure includes steps for producing baculovirus infected insect cells (BIICs) using Viral Production Cells (VPC) and plasmid constructs. Viral Production Cells (VPCs) from a Cell Bank (CB) are thawed and expanded to provide a target working volume and VPC concentration. The resulting pool of VPCs is split into a Rep/Cap VPC pool and a Payload VPC pool. One or more Rep/Cap plasmid constructs (viral expression constructs) are processed into Rep/Cap Bacmid polynucleotides and transfected into the Rep/Cap VPC pool. One or more Payload plasmid constructs (payload constructs) are processed into Payload Bacmid polynucleotides and transfected into the Payload VPC pool. The two VPC pools are incubated to produce P1 Rep/Cap Baculoviral Expression Vectors (BEVs) and P1 Payload BEVs. The two BEV pools are expanded into a collection of Plaques, with a single Plaque being selected for Clonal Plaque (CP) Purification (also referred to as Single Plaque Expansion). The process can include a single CP Purification step or can include multiple CP Purification steps either in series or separated by other processing steps. The one-or-more CP Purification steps provide a CP Rep/Cap BEV pool and a CP Payload BEV pool. These two BEV pools can then be stored and used for future production steps, or they can be then transfected into VPCs to produce a Rep/Cap BIIC pool and a Payload BIIC pool.

[1000] In certain embodiments, a viral production system or process of the present disclosure includes steps for producing AAV particles using Viral Production Cells (VPC) and baculovirus infected insect cells (BIICs). Viral Production Cells (VPCs) from a Cell Bank (CB) are thawed and expanded to provide a target working volume and VPC concentration. The working volume of Viral Production Cells is seeded into a Production Bioreactor and can be further expanded to a working volume of 200-2000 L with a target VPC concentration for BIIC infection. The working volume of VPCs in the Production Bioreactor is then co-infected with Rep/Cap BIICs and Payload BIICs, with a target VPC:BIIC ratio and a target BIIC:BIIC ratio. VCD infection can also utilize BEVs. The co-infected VPCs are incubated and expanded in the Production Bioreactor to produce a bulk harvest of AAV particles and VPCs.

### Viral Expression Constructs

[1001] In various embodiments, the viral production system of the present disclosure includes one or more viral expression constructs that can be transfected/transduced into a viral production cell. In certain embodiments, a viral expression construct or a payload construct of the present disclosure can be a bacmid, also known as a baculovirus plasmid or recombinant baculovirus genome. In certain embodiments, the viral expression includes a protein-coding nucleotide sequence and at least one expression control sequence for expression in a viral production cell. In certain embodiments, the viral expression includes a protein-coding nucleotide sequence operably linked to least one expression control sequence for expression in a viral production cell. In certain embodiments, the viral expression construct contains parvoviral genes under control of one or more promoters. Parvoviral genes can include nucleotide sequences encoding non-structural AAV replication proteins, such as Rep genes which encode Rep52, Rep40, Rep68, or Rep78 proteins. Parvoviral genes can include nucleotide sequences encoding structural AAV proteins, such as Cap genes which encode VP1, VP2, and VP3 proteins.

[1002] Viral expression constructs of the present disclosure may include any compound or formulation, biological or chemical, which facilitates transformation, transfection, or transduction of a cell with a nucleic acid. Exemplary biological viral expression constructs include plasmids, linear nucleic acid molecules, and recombinant viruses including baculovirus. Exemplary chemical vectors include lipid complexes. Viral expression constructs are used to incorporate nucleic acid sequences into virus replication cells in accordance with the present disclosure. (O'Reilly, David R., Lois K. Miller, and Verne A. Luckow. Baculovirus expression vectors: a laboratory manual. Oxford University Press, 1994.); Maniatis et al., eds. Molecular Cloning. CSH Laboratory, NY, N.Y. (1982); and, Philiport and Scluber, eds. Liposomes as tools in Basic Research and Industry. CRC Press, Ann Arbor, Mich. (1995), the contents of each of which are herein incorporated by reference in their entirety as related to viral expression constructs and uses thereof.

[1003] In certain embodiments, the viral expression construct is an AAV expression construct which includes one or more nucleotide sequences encoding non-structural AAV replication proteins, structural AAV capsid proteins, or a combination thereof.

[1004] In certain embodiments, the viral expression construct of the present disclosure may be a plasmid vector. In certain embodiments, the viral expression construct of the present disclosure may be a baculoviral construct.

[1005] The present disclosure is not limited by the number of viral expression constructs employed to produce AAV particles or viral vectors. In certain embodiments, one, two, three, four, five, six, or more viral expression constructs can be employed to produce AAV particles in viral production cells in accordance with the present disclosure. In certain embodiments of the present disclosure, a viral expression construct may be used for the production of an AAV particles in insect cells. In certain embodiments, modifications may be made to the wild type AAV sequences of the capsid and/or rep genes, for example to improve attributes of the viral particle, such as increased infectivity or specificity, or to enhance production yields.

[1006] In certain embodiments, the viral expression construct may contain a nucleotide sequence which includes start codon region, such as a sequence encoding AAV capsid proteins which include one or more start codon regions. In certain embodiments, the start codon region can be within an expression control sequence. The start codon can be ATG or a non-ATG codon (i.e., a suboptimal start codon where the start codon of the AAV VP1 capsid protein is a non-ATG).

[1007] In certain embodiments, the viral expression construct used for AAV production may contain a nucleotide sequence encoding the AAV capsid proteins where the initiation codon of the AAV VP1 capsid protein is a non-ATG, i.e., a suboptimal initiation codon, allowing the expression of a modified ratio of the viral capsid proteins in the production system, to provide improved infectivity of the host cell. In a non-limiting example, a viral construct vector may contain a nucleic acid construct comprising a nucleotide sequence encoding AAV VP1, VP2, and VP3 capsid proteins, wherein the initiation codon for translation of the AAV VP1 capsid protein is CTG, TTG, or GTG, as described in U.S. Pat. No. 8,163,543, the contents of which are herein incorporated by reference in their entirety as related to AAV capsid proteins and the production thereof.

[1008] In certain embodiments, the viral expression construct of the present disclosure may be a plasmid vector or a baculoviral construct that encodes the parvoviral rep proteins for expression in insect cells. In certain embodiments, a single coding sequence is used for the Rep78 and Rep52 proteins, wherein start codon for translation of the Rep78 protein is a suboptimal start codon, selected from the group consisting of ACG, TTG, CTG, and GTG, that effects partial exon skipping upon expression in insect cells, as described in U.S. Pat. No. 8,512,981, the contents of which are herein incorporated by reference in their entirety, for example to promote less abundant expression of Rep78 as compared to Rep52, which may promote high vector yields.

[1009] In certain embodiments, a VP-coding region encodes one or more AAV capsid proteins of a specific AAV serotype. The AAV serotypes for VP-coding regions can be the same or different. In certain embodiments, a VP-coding region can be codon optimized. In certain embodiments, a VP-coding region or nucleotide sequence can be codon optimized for a mammal cell. In certain embodiments, a VP-coding region or nucleotide sequence can be codon optimized for an insect cell. In certain embodiments, a VP-coding region or nucleotide sequence can be codon optimized for a Spodoptera frugiperda cell. In certain embodiments, a VP-coding region or nucleotide sequence can be codon optimized for Sf9 or Sf21 cell lines.

[1010] In certain embodiments, a nucleotide sequence encoding one or more VP capsid proteins can be codon optimized to have a nucleotide homology with the reference nucleotide sequence of less than 100%. In certain embodiments, the nucleotide homology between the codon-optimized VP nucleotide sequence and the reference VP nucleotide sequence is less than 100%, less than 99%, less than 98%, less than 97%, less than 96%, less than 95%, less than 94%, less than 93%, less than 92%, less than 91%, less than 90%, less than 89%, less than 88%, less than 87%, less than 86%, less than 85%, less than 84%, less than 83%, less than 82%, less than 81%, less than 80%, less than 78%, less than 76%, less than 74%, less than 72%, less than 70%, less than 68%, less than 66%, less than 64%, less than 62%, less than 60%, less than 55%, less than 50%, and less than 40%.

[1011] In certain embodiments, a viral expression construct or a payload construct of the present disclosure can be a bacmid, also known as a baculovirus plasmid or recombinant baculovirus genome. In certain embodiments, a viral expression construct or a payload construct of the present disclosure (e.g. bacmid) can include a polynucleotide incorporated by homologous recombination (transposon donor/acceptor system) into the bacmid by standard molecular biology techniques known and performed by a person skilled in the art.

[1012] In certain embodiments, the polynucleotide incorporated into the bacmid (i.e. polynucleotide insert) can include an expression control sequence operably linked to a protein-coding nucleotide sequence. In certain embodiments, the polynucleotide incorporated into the bacmid can include an expression control sequence which includes a promoter, such as p10 or polh, and which is operably linked to a nucleotide sequence which encodes a structural AAV capsid protein (e.g. VP1, VP2, VP3 or a combination thereof). In certain embodiments, the polynucleotide incorporated into the bacmid can include an expression control sequence which includes a promoter, such as p10 or polh, and which is operably linked to a nucleotide sequence which encodes a non-structural AAV capsid protein (e.g. Rep78, Rep52, or a combination thereof).

[1013] The method of the present disclosure is not limited by the use of specific expression control sequences. However, when a certain stoichiometry of VP products are achieved (close to 1:1:10 for VP1, VP2, and VP3, respectively) and also when the levels of Rep52 or Rep40 (also referred to as the p19 Reps) are significantly higher than Rep78 or Rep68 (also referred to as the p5 Reps), improved yields of AAV in production cells (such as insect cells) may be obtained. In certain embodiments, the p5/p19 ratio is below 0.6 more, below 0.4, or below 0.3, but always at least 0.03. These ratios can be measured at the level of the protein or can be implicated from the relative levels of specific mRNAs.

[1014] In certain embodiments, AAV particles are produced in viral production cells (such as mammalian or insect cells) wherein all three VP proteins are expressed at a stoichiometry approaching, about or which is: 1:1:10 (VP1:VP2:VP3); 2:2:10 (VP1:VP2:VP3); 2:0:10 (VP1:VP2:VP3); 1-2:0-2:10 (VP1:VP2:VP3); 1-2:1-2:10 (VP1:VP2:VP3); 2-3:0-3:10 (VP1:VP2:VP3); 2-3:2-3:10 (VP1:VP2:VP3); 3:3:10 (VP1:VP2:VP3); 3-5:0-5:10 (VP1:VP2:VP3); or 3-5:3-5:10 (VP1:VP2:VP3).

[1015] In certain embodiments, the expression control regions are engineered to produce a VP1:VP2:VP3 ratio selected from the group consisting of: about or exactly 1:0:10; about or exactly 1:1:10; about or exactly 2:1:10; about or exactly 2:1:10; about or exactly 2:2:10; about or exactly 3:0:10; about or exactly 3:1:10; about or exactly 3:2:10; about or exactly 3:3:10; about or exactly 4:0:10; about or exactly 4:1:10; about or exactly 4:2:10; about or exactly 4:3:10; about or exactly 4:4:10; about or exactly 5:5:10; about or exactly 1-2:0-2:10; about or exactly 1-2:1-2:10; about or exactly 1-3:0-3:10; about or exactly 1-3:1-3:10; about or exactly 1-4:0-4:10; about or exactly 1-4:1-4:10; about or exactly 1-5:1-5:10; about or exactly 2-3:0-3:10; about or exactly 2-3:2-3:10; about or exactly 2-4:2-4:10; about or exactly 2-5:2-5:10; about or exactly 3-4:3-4:10; about or exactly 3-5:3-5:10; and about or exactly 4-5:4-5:10.

[1016] In certain embodiments of the present disclosure, Rep52 or Rep78 is transcribed from the baculoviral derived polyhedron promoter (polh). Rep52 or Rep78 can also be transcribed from a weaker promoter, for example a deletion mutant of the ie-1 promoter, the Δie-1 promoter, has about 20% of the transcriptional activity of that ie-1 promoter. A promoter substantially homologous to the Δie-1 promoter may be used. In respect to promoters, a homology of at least 50%, 60%, 70%, 80%, 90% or more, is considered to be a substantially homologous promoter.

### Mammalian Cells

[1017] Viral production of the present disclosure disclosed herein describes processes and methods for producing AAV particles or viral vector that contacts a target cell to deliver a payload construct, e.g. a recombinant AAV particle or viral construct, which includes a nucleotide encoding a payload molecule. The viral production cell may be selected from any biological organism, including prokaryotic (e.g., bacterial) cells, and eukaryotic cells, including, insect cells, yeast cells and mammalian cells.

[1018] In certain embodiments, the AAV particles of the present disclosure may be produced in a viral production cell that includes a mammalian cell. Viral production cells may comprise mammalian cells such as A549, WEH1, 3T3, 10T1/2, BHK, MDCK, COS 1, COS 7, BSC 1, BSC 40, BMT 10, VERO, W138, HeLa, HEK293, HEK293T (293T), Saos, C2C12, L cells, HT1080, Huh7, HepG2, C127, 3T3, CHO, HeLa cells, KB cells, BHK and primary fibroblast, hepatocyte, and myoblast cells derived from mammals. Viral production cells can include cells derived from any mammalian species including, but not limited to, human, monkey, mouse, rat, rabbit, and hamster or cell type, including but not limited to fibroblast, hepatocyte, tumor cell, cell line transformed cell, etc.

[1019] AAV viral production cells commonly used for production of recombinant AAV particles include, but is not limited to other mammalian cell lines as described in U.S. Pat. Nos. 6,156,303, 5,387,484, 5,741,683, 5,691,176, 6,428,988 and 5,688,676; U.S. patent application 2002/0081721, and International Patent Publication Nos. WO 00/47757, WO 00/24916, and WO 96/17947, the contents of each of which are herein incorporated by reference in their entireties insofar as they do no conflict with the present disclosure. In certain embodiments, the AAV viral production cells are trans-complementing packaging cell lines that provide functions deleted from a replication-defective helper virus, e.g., HEK293 cells or other Ea trans-complementing cells.

[1020] In certain embodiments, the packaging cell line 293-10-3 (ATCC Accession No. PTA-2361) may be used to produce the AAV particles, as described in U.S. Pat. No. 6,281,010, the contents of which are herein incorporated by reference in their entirety as related to the 293-10-3 packaging cell line and uses thereof.

[1021] In certain embodiments, of the present disclosure a cell line, such as a HeLA cell line, for trans-complementing E1 deleted adenoviral vectors, which encoding adenovirus E1a and adenovirus E1b under the control of a phosphoglycerate kinase (PGK) promoter can be used for AAV particle production as described in U.S. Pat. No. 6,365,394, the contents of which are incorporated herein by reference in their entirety as related to the HeLa cell line and uses thereof.

[1022] In certain embodiments, AAV particles are produced in mammalian cells using a multiplasmid transient transfection method (such as triple plasmid transient transfection). In certain embodiments, the multiplasmid transient transfection method includes transfection of the following three different constructs: (i) a payload construct, (ii) a Rep/Cap construct (parvoviral Rep and parvoviral Cap), and (iii) a helper construct. In certain embodiments, the triple transfection method of the three components of AAV particle production may be utilized to produce small lots of virus for assays including transduction efficiency, target tissue (tropism) evaluation, and stability. In certain embodiments, the triple transfection method of the three components of AAV particle production may be utilized to produce large lots of materials for clinical or commercial applications.

[1023] AAV particles to be formulated may be produced by triple transfection or baculovirus mediated virus production, or any other method known in the art. Any suitable permissive or packaging cell known in the art may be employed to produce the vectors. In certain embodiments, trans-complementing packaging cell lines are used that provide functions deleted from a replication-defective helper virus, e.g., 293 cells or other Ela trans-complementing cells.

[1024] The gene cassette may contain some or all of the parvovirus (e.g., AAV) cap and rep genes. In certain embodiments, some or all of the cap and rep functions are provided in trans by introducing a packaging vector(s) encoding the capsid and/or Rep proteins into the cell. In certain embodiments, the gene cassette does not encode the capsid or Rep proteins. Alternatively, a packaging cell line is used that is stably transformed to express the cap and/or rep genes.

[1025] Recombinant AAV virus particles are, in certain embodiments, produced and purified from culture supernatants according to the procedure as described in US2016/0032254, the contents of which are incorporated by reference in their entirety as related to the production and processing of recombinant AAV virus particles. Production may also involve methods known in the art including those using 293T cells, triple transfection or any suitable production method.

[1026] In certain embodiments, mammalian viral production cells (e.g. 293T cells) can be in an adhesion/adherent state (e.g. with calcium phosphate) or a suspension state (e.g. with polyethyleneimine (PEI)). The mammalian viral production cell is transfected with plasmids required for production of AAV, (i.e., AAV rep/cap construct, an adenoviral helper construct, and/or ITR flanked payload construct). In certain embodiments, the transfection process can include optional medium changes (e.g. medium changes for cells in adhesion form, no medium changes for cells in suspension form, medium changes for cells in suspension form if desired). In certain embodiments, the transfection process can include transfection mediums such as DMEM or F17. In certain embodiments, the transfection medium can include serum or can be serum-free (e.g. cells in adhesion state with calcium phosphate and with serum, cells in suspension state with PEI and without serum).

[1027] Cells can subsequently be collected by scraping (adherent form) and/or pelleting (suspension form and scraped adherent form) and transferred into a receptacle. Collection steps can be repeated as necessary for full collection of produced cells. Next, cell lysis can be achieved by consecutive freeze-thaw cycles (−80 C to 37 C), chemical lysis (such as adding detergent triton), mechanical lysis, or by allowing the cell culture to degrade after reaching ˜0% viability. Cellular debris is removed by centrifugation and/or depth filtration. The samples are quantified for AAV particles by DNase resistant genome titration by DNA qPCR.

[1028] AAV particle titers are measured according to genome copy number (genome particles per milliliter). Genome particle concentrations are based on DNA qPCR of the vector DNA as previously reported (Clark et al. (1999) Hum. Gene Ther., 10:1031-1039; Veldwijk et al. (2002) Mol. Ther., 6:272-278, the contents of which are each incorporated by reference in their entireties as related to the measurement of particle concentrations).

### Insect Cells

[1029] Viral production of the present disclosure includes processes and methods for producing AAV particles or viral vectors that contact a target cell to deliver a payload construct, e.g., a recombinant viral construct, which includes a nucleotide encoding a payload molecule. In certain embodiments, the AAV particles or viral vectors of the present disclosure may be produced in a viral production cell that includes an insect cell.

[1030] Growing conditions for insect cells in culture, and production of heterologous products in insect cells in culture are well-known in the art, see U.S. Pat. No. 6,204,059, the contents of which are herein incorporated by reference in their entirety as related to the growth and use of insect cells in viral production.

[1031] Any insect cell which allows for replication of parvovirus and which can be maintained in culture can be used in accordance with the present disclosure. AAV viral production cells commonly used for production of recombinant AAV particles include, but is not limited to, Spodoptera frugiperda, including, but not limited to the Sf9 or Sf21 cell lines, Drosophila cell lines, or mosquito cell lines, such as Aedes albopictus derived cell lines. Use of insect cells for expression of heterologous proteins is well documented, as are methods of introducing nucleic acids, such as vectors, e.g., insect-cell compatible vectors, into such cells and methods of maintaining such cells in culture. See, for example, Methods in Molecular Biology, ed. Richard, Humana Press, NJ (1995); O'Reilly et al., Baculovirus Expression Vectors, A Laboratory Manual, Oxford Univ. Press (1994); Samulski et al., J. Vir. 63:3822-8 (1989); Kajigaya et al., Proc. Nat'l. Acad. Sci. USA 88: 4646-50 (1991); Ruffing et al., J. Vir. 66:6922-30 (1992); Kimbauer et al., Vir. 219:37-44 (1996); Zhao et al., Vir. 272:382-93 (2000); and Samulski et al., U.S. Pat. No. 6,204,059, the contents of each of which are herein incorporated by reference in their entirety as related to the use of insect cells in viral production.

[1032] In some embodiments, the AAV particles are made using the methods described in WO2015/191508, the contents of which are herein incorporated by reference in their entirety insofar as they do not conflict with the present disclosure.

[1033] In certain embodiments, insect host cell systems, in combination with baculoviral systems (e.g., as described by Luckow et al., Bio/Technology 6: 47 (1988)) may be used. In certain embodiments, an expression system for preparing chimeric peptide is Trichoplusia ni, Tn 5B1-4 insect cells/baculoviral system, which can be used for high levels of proteins, as described in U.S. Pat. No. 6,660,521, the contents of which are herein incorporated by reference in their entirety as related to the production of viral particles.

[1034] Expansion, culturing, transfection, infection and storage of insect cells can be carried out in any cell culture media, cell transfection media or storage media known in the art, including Hyclone™ SFX-Insect™ Cell Culture Media, Expression System ESF AF™ Insect Cell Culture Medium, ThermoFisher Sf-900II™ media, ThermoFisher Sf-900III™ media, or ThermoFisher Grace's Insect Media. Insect cell mixtures of the present disclosure can also include any of the formulation additives or elements described in the present disclosure, including (but not limited to) salts, acids, bases, buffers, surfactants (such as Poloxamer 188/Pluronic F-68), and other known culture media elements. Formulation additives can be incorporated gradually or as “spikes” (incorporation of large volumes in a short time).

### Baculovirus-Production Systems

[1035] In certain embodiments, processes of the present disclosure can include production of AAV particles or viral vectors in a baculoviral system using a viral expression construct and a payload construct vector. In certain embodiments, the baculoviral system includes Baculovirus expression vectors (BEVs) and/or baculovirus infected insect cells (BIICs). In certain embodiments, a viral expression construct or a payload construct of the present disclosure can be a bacmid, also known as a baculovirus plasmid or recombinant baculovirus genome. In certain embodiments, a viral expression construct or a payload construct of the present disclosure can be polynucleotide incorporated by homologous recombination (transposon donor/acceptor system) into a bacmid by standard molecular biology techniques known and performed by a person skilled in the art. Transfection of separate viral replication cell populations produces two or more groups (e.g. two, three) of baculoviruses (BEVs), one or more group which can include the viral expression construct (Expression BEV), and one or more group which can include the payload construct (Payload BEV). The baculoviruses may be used to infect a viral production cell for production of AAV particles or viral vector.

[1036] In certain embodiments, the process includes transfection of a single viral replication cell population to produce a single baculovirus (BEV) group which includes both the viral expression construct and the payload construct. These baculoviruses may be used to infect a viral production cell for production of AAV particles or viral vector.

[1037] In certain embodiments, BEVs are produced using a Bacmid Transfection agent, such as Promega FuGENE@HD, WFI water, or ThermoFisher Cellfectin® II Reagent. In certain embodiments, BEVs are produced and expanded in viral production cells, such as an insect cell.

[1038] In certain embodiments, the method utilizes seed cultures of viral production cells that include one or more BEVs, including baculovirus infected insect cells (BIICs). The seed BIICs have been transfected/transduced/infected with an Expression BEV which includes a viral expression construct, and also a Payload BEV which includes a payload construct. In certain embodiments, the seed cultures are harvested, divided into aliquots and frozen, and may be used at a later time to initiate transfection/transduction/infection of a naïve population of production cells. In certain embodiments, a bank of seed BIICs is stored at −80° C. or in LN2 vapor.

[1039] Baculoviruses are made of several essential proteins which are essential for the function and replication of the Baculovirus, such as replication proteins, envelope proteins and capsid proteins. The Baculovirus genome thus includes several essential-gene nucleotide sequences encoding the essential proteins. As a non-limiting example, the genome can include an essential-gene region which includes an essential-gene nucleotide sequence encoding an essential protein for the Baculovirus construct. The essential protein can include: GP64 baculovirus envelope protein, VP39 baculovirus capsid protein, or other similar essential proteins for the Baculovirus construct.

[1040] Baculovirus expression vectors (BEV) for producing AAV particles in insect cells, including but not limited to Spodoptera frugiperda (Sf9) cells, provide high titers of viral vector product. Recombinant baculovirus encoding the viral expression construct and payload construct initiates a productive infection of viral vector replicating cells. Infectious baculovirus particles released from the primary infection secondarily infect additional cells in the culture, exponentially infecting the entire cell culture population in a number of infection cycles that is a function of the initial multiplicity of infection, see Urabe, M. et al. J Virol. 2006 February; 80(4):1874-85, the contents of which are herein incorporated by reference in their entirety as related to the production and use of BEVs and viral particles.

[1041] Production of AAV particles with baculovirus in an insect cell system may address known baculovirus genetic and physical instability.

[1042] In certain embodiments, the production system of the present disclosure addresses baculovirus instability over multiple passages by utilizing a titerless infected-cells preservation and scale-up system. Small scale seed cultures of viral producing cells are transfected with viral expression constructs encoding the structural and/or non-structural components of the AAV particles. Baculovirus-infected viral producing cells are harvested into aliquots that may be cryopreserved in liquid nitrogen; the aliquots retain viability and infectivity for infection of large scale viral producing cell culture. Wasilko D J et al. Protein Expr Purif. 2009 June; 65(2):122-32, the contents of which are herein incorporated by reference in their entirety as related to the production and use of BEVs and viral particles.

[1043] A genetically stable baculovirus may be used to produce a source of the one or more of the components for producing AAV particles in invertebrate cells. In certain embodiments, defective baculovirus expression vectors may be maintained episomally in insect cells. In such embodiments, the corresponding bacmid vector is engineered with replication control elements, including but not limited to promoters, enhancers, and/or cell-cycle regulated replication elements.

[1044] In certain embodiments, stable viral producing cells permissive for baculovirus infection are engineered with at least one stable integrated copy of any of the elements necessary for AAV replication and vector production including, but not limited to, the entire AAV genome, Rep and Cap genes, Rep genes, Cap genes, each Rep protein as a separate transcription cassette, each VP protein as a separate transcription cassette, the AAP (assembly activation protein), or at least one of the baculovirus helper genes with native or non-native promoters.

[1045] In some embodiments, the AAV particle of the present disclosure may be produced in insect cells (e.g., Sf9 cells).

[1046] In some embodiments, the AAV particle of the present disclosure may be produced using triple transfection.

[1047] In some embodiments, the AAV particle of the present disclosure may be produced in mammalian cells.

[1048] In some embodiments, the AAV particle of the present disclosure may be produced by triple transfection in mammalian cells.

[1049] In some embodiments, the AAV particle of the present disclosure may be produced by triple transfection in HEK293 cells.

[1050] The AAV viral genomes encoding GCase protein described herein may be useful in the fields of human disease, veterinary applications and a variety of in vivo and in vitro settings. The AAV particles of the present disclosure may be useful in the field of medicine for the treatment, prophylaxis, palliation, or amelioration of neurological or neuromuscular diseases and/or disorders. In some embodiments, the AAV particles of the disclosure are used for the prevention and/or treatment of GBA-related disorders.

[1051] Various embodiments of the disclosure herein provide a pharmaceutical composition comprising the AAV particle described herein and a pharmaceutically acceptable excipient.

[1052] Various embodiments of the disclosure herein provide a method of treating a subject in need thereof comprising administering to the subject a therapeutically effective amount of the pharmaceutical composition described herein.

[1053] Certain embodiments of the method provide that the subject is treated by a route of administration of the pharmaceutical composition selected from the group consisting of: intravenous, intracerebroventricular, intraparenchymal, intrathecal, subpial, and intramuscular, or a combination thereof. Certain embodiments of the method provide that the subject is treated for GBA-related disorders and/or other neurological disorder arising from a deficiency in the quantity or function of GBA gene products. In one aspect of the method, a pathological feature of the GBA-related disorders or the other neurological disorder is alleviated and/or the progression of the GBA-related disorders or the other neurological disorder is halted, slowed, ameliorated, or reversed.

[1054] Various embodiments of the disclosure herein describe a method of increasing the level of GCase protein in the central nervous system of a subject in need thereof comprising administering to said subject via infusion, an effective amount of the pharmaceutical composition described herein.

[1055] Also described herein are compositions, methods, processes, kits and devices for the design, preparation, manufacture and/or formulation of AAV particles. In some embodiments, payloads, such as but not limited to payloads comprising GCase protein, may be encoded by payload constructs or contained within plasmids or vectors or recombinant adeno-associated viruses (AAVs).

[1056] The present disclosure also provides administration and/or delivery methods for vectors and viral particles, e.g., AAV particles, for the treatment or amelioration of GBA-related disorders. Such methods may involve gene replacement or gene activation. Such outcomes are achieved by utilizing the methods and compositions taught herein.

### III. Pharmaceutical Compositions

[1057] The present disclosure additionally provides a method for treating GBA-related disorders and disorders related to deficiencies in the function or expression of GCase protein(s) in a mammalian subject, including a human subject, comprising administering to the subject any of the AAV polynucleotides or AAV genomes described herein (i.e., “vector genomes,” “viral genomes,” or “VGs”) or administering to the subject a particle comprising said AAV polynucleotide or AAV genome, or administering to the subject any of the described compositions, including pharmaceutical compositions.

[1058] As used herein the term “composition” comprises an AAV polynucleotide or AAV genome or AAV particle and at least one excipient.

[1059] As used herein the term “pharmaceutical composition” comprises an AAV polynucleotide or AAV genome or AAV particle and one or more pharmaceutically acceptable excipients.

[1060] Although the descriptions of pharmaceutical compositions, e.g., AAV comprising a payload encoding a GCase protein to be delivered, provided herein are principally directed to pharmaceutical compositions which are suitable for administration to humans, it will be understood by the skilled artisan that such compositions are generally suitable for administration to any other animal, e.g., to non-human animals, e.g. non-human mammals. Modification of pharmaceutical compositions suitable for administration to humans in order to render the compositions suitable for administration to various animals is well understood, and the ordinarily skilled veterinary pharmacologist can design and/or perform such modification with merely ordinary, if any, experimentation. Subjects to which administration of the pharmaceutical compositions is contemplated include, but are not limited to, humans and/or other primates; mammals, including commercially relevant mammals such as cattle, pigs, horses, sheep, cats, dogs, mice, and/or rats; and/or birds, including commercially relevant birds such as poultry, chickens, ducks, geese, and/or turkeys.

[1061] In some embodiments, compositions are administered to humans, human patients, or subjects.

[1062] In some embodiments, the AAV particle formulations described herein may contain a nucleic acid encoding at least one payload. In some embodiments, the formulations may contain a nucleic acid encoding 1, 2, 3, 4, or 5 payloads. In some embodiments, the formulation may contain a nucleic acid encoding a payload construct encoding proteins selected from categories such as, but not limited to, human proteins, veterinary proteins, bacterial proteins, biological proteins, antibodies, immunogenic proteins, therapeutic peptides and proteins, secreted proteins, plasma membrane proteins, cytoplasmic proteins, cytoskeletal proteins, intracellular membrane bound proteins, nuclear proteins, proteins associated with human disease, and/or proteins associated with non-human diseases. In some embodiments, the formulation contains at least three payload constructs encoding proteins. Certain embodiments provide that at least one of the payloads is GCase protein or a variant thereof.

[1063] A pharmaceutical composition in accordance with the present disclosure may be prepared, packaged, and/or sold in bulk, as a single unit dose, and/or as a plurality of single unit doses. As used herein, a “unit dose” refers to a discrete amount of the pharmaceutical composition comprising a predetermined amount of the active ingredient. The amount of the active ingredient is generally equal to the dosage of the active ingredient which would be administered to a subject and/or a convenient fraction of such a dosage such as, for example, one-half or one-third of such a dosage.

### IV. Formulations

[1064] Formulations of the AAV pharmaceutical compositions described herein may be prepared by any method known or hereafter developed in the art of pharmacology. In general, such preparatory methods include the step of bringing the active ingredient into association with an excipient and/or one or more other accessory ingredients, and then, if necessary and/or desirable, dividing, shaping and/or packaging the product into a desired single- or multi-dose unit.

[1065] Relative amounts of the active ingredient, the pharmaceutically acceptable excipient, and/or any additional ingredients in a pharmaceutical composition in accordance with the disclosure will vary, depending upon the identity, size, and/or condition of the subject treated and further depending upon the route by which the composition is to be administered.

[1066] For example, the composition may comprise between 0.1% and 99% (w/w) of the active ingredient. By way of example, the composition may comprise between 0.1% and 100%, e.g., between 0.5% and 50%, between 1-30%, between 5-80%, or at least 80% (w/w) active ingredient.

[1067] The AAV particles of the disclosure can be formulated using one or more excipients to: (1) increase stability; (2) increase cell transfection or transduction; (3) permit the sustained or delayed release; (4) alter the biodistribution (e.g., target the viral particle to specific tissues or cell types); (5) increase the translation of encoded protein in vivo; (6) alter the release profile of encoded protein in vivo and/or (7) allow for regulatable expression of the payload.

[1068] Formulations of the present disclosure can include, without limitation, saline, lipidoids, liposomes, lipid nanoparticles, polymers, lipoplexes, core-shell nanoparticles, peptides, proteins, cells transfected with viral vectors (e.g., for transplantation into a subject), nanoparticle mimics and combinations thereof. Further, the viral vectors of the present disclosure may be formulated using self-assembled nucleic acid nanoparticles.

[1069] In some embodiments, the viral vectors encoding GCase protein may be formulated to optimize baricity and/or osmolality. In some embodiments, the baricity and/or osmolality of the formulation may be optimized to ensure optimal drug distribution in the central nervous system or a region or component of the central nervous system.

[1070] In some embodiments, the AAV particles of the disclosure may be formulated in PBS with 0.001% of pluronic acid (F-68) at a pH of about 7.0.

[1071] In some embodiments, the AAV particles of the disclosure may be formulated in PBS, in combination with an ethylene oxide/propylene oxide copolymer (also known as pluronic or poloxamer).

[1072] In some embodiments, the AAV particles of the disclosure may be formulated in PBS with 0.001% pluronic acid (F-68) (poloxamer 188) at a pH of about 7.0.

[1073] In some embodiments, the AAV particles of the disclosure may be formulated in PBS with 0.001% pluronic acid (F-68) (poloxamer 188) at a pH of about 7.3.

[1074] In some embodiments, the AAV particles of the disclosure may be formulated in PBS with 0.001% pluronic acid (F-68) (poloxamer 188) at a pH of about 7.4.

[1075] In some embodiments, the AAV particles of the disclosure may be formulated in a solution comprising sodium chloride, sodium phosphate and an ethylene oxide/propylene oxide copolymer.

[1076] In some embodiments, the AAV particles of the disclosure may be formulated in a solution comprising sodium chloride, sodium phosphate dibasic, potassium chloride, potassium phosphate monobasic, and poloxamer 188/pluronic acid (F-68).

[1077] In some embodiments, the AAV particles of the disclosure may be formulated in a solution comprising 192 mM sodium chloride, 10 mM sodium phosphate (dibasic), 2.7 mM potassium chloride, 2 mM potassium phosphate (monobasic) and 0.001% pluronic F-68 (v/v), at pH 7.4. This formulation is referred to as Formulation 1 in the present disclosure.

[1078] In some embodiments, the AAV particles of the disclosure may be formulated in a solution comprising about 192 mM sodium chloride, about 10 mM sodium phosphate dibasic and about 0.001% poloxamer 188, at a pH of about 7.3. The concentration of sodium chloride in the final solution may be 150 mM-200 mM. As non-limiting examples, the concentration of sodium chloride in the final solution may be 150 mM, 160 mM, 170 mM, 180 mM, 190 mM or 200 mM. The concentration of sodium phosphate dibasic in the final solution may be 1 mM-50 mM. As non-limiting examples, the concentration of sodium phosphate dibasic in the fmal solution may be 1 mM, 2 mM, 3 mM, 4 mM, 5 mM, 6 mM, 7 mM, 8 mM, 9 mM, 10 mM, 15 mM, 20 mM, 25 mM, 30 mM, 40 mM, or 50 mM. The concentration of poloxamer 188 (pluronic acid (F-68)) may be 0.0001/6-1%. As non-limiting examples, the concentration of poloxamer 188 (pluronic acid (F-68)) may be 0.0001%, 0.0005%, 0.001%, 0.005%, 0.01%, 0.05%, 0.1%, 0.5%, or 1%. The final solution may have a pH of 6.8-7.7. Non-limiting examples for the pH of the final solution include a pH of 6.8, 6.9, 7.0, 7.1, 7.2, 7.3, 7.4, 7.5, 7.6, or 7.7.

[1079] In some embodiments, the AAV particles of the disclosure may be formulated in a solution comprising about 1.05% sodium chloride, about 0.212% sodium phosphate dibasic, heptahydrate, about 0.025% sodium phosphate monobasic, monohydrate, and 0.001% poloxamer 188, at a pH of about 7.4. As a non-limiting example, the concentration of AAV particle in this formulated solution may be about 0.001%. The concentration of sodium chloride in the final solution may be 0.1-2.0%, with non-limiting examples of 0.1%, 0.25%, 0.5%, 0.75%, 0.95%, 0.96%, 0.97%, 0.98%, 0.99%, 1.00%, 1.01%, 1.02%, 1.03%, 1.04%, 1.05%, 1.06%, 1.07%, 1.08%, 1.09%, 1.10%, 1.25%, 1.5%, 1.75%, or 2%. The concentration of sodium phosphate dibasic in the final solution may be 0.100-0.300% with non-limiting examples including 0.100%, 0.125%, 0.150%, 0.175%, 0.200%, 0.210%, 0.211%, 0.212%, 0.213%, 0.214%, 0.215%, 0.225%, 0.250%, 0.275%, 0.300%. The concentration of sodium phosphate monobasic in the final solution may be 0.010-0.050%, with non-limiting examples of 0.010%, 0.015%, 0.020%, 0.021%, 0.022%, 0.023%, 0.024%, 0.025%, 0.026%, 0.027%, 0.028%, 0.029%, 0.030%, 0.035%, 0.040%, 0.045%, or 0.050%. The concentration of poloxamer 188 (pluronic acid (F-68)) may be 0.0001/6-1%. As non-limiting examples, the concentration of poloxamer 188 (pluronic acid (F-68)) may be 0.0001%, 0.0005%, 0.001%, 0.005%, 0.01%, 0.05%, 0.1%, 0.5%, or 1%. The final solution may have a pH of 6.8-7.7. Non-limiting examples for the pH of the final solution include a pH of 6.8, 6.9, 7.0, 7.1, 7.2, 7.3, 7.4, 7.5, 7.6, or 7.7.

### Excipients

[1080] The formulations of the disclosure can include one or more excipients, each in an amount that together increases the stability of the AAV particle, increases cell transfection or transduction by the viral particle, increases the expression of viral particle encoded protein, and/or alters the release profile of AAV particle encoded proteins. In some embodiments, a pharmaceutically acceptable excipient may be at least 95%, at least 96%, at least 97%, at least 98%, at least 99%, or 100% pure. In some embodiments, an excipient is approved for use for humans and for veterinary use. In some embodiments, an excipient may be approved by United States Food and Drug Administration. In some embodiments, an excipient may be of pharmaceutical grade. In some embodiments, an excipient may meet the standards of the United States Pharmacopoeia (USP), the European Pharmacopoeia (EP), the British Pharmacopoeia, and/or the International Pharmacopoeia.

[1081] Excipients, which, as used herein, include, but are not limited to, any and all solvents, dispersion media, diluents, or other liquid vehicles, dispersion or suspension aids, surface active agents, isotonic agents, thickening or emulsifying agents, preservatives, and the like, as suited to the particular dosage form desired. Various excipients for formulating pharmaceutical compositions and techniques for preparing the composition are known in the art (see Remington: The Science and Practice of Pharmacy, 21st Edition, A. R. Gennaro, Lippincott, Williams & Wilkins, Baltimore, MD, 2006; the contents of which are herein incorporated by reference in their entirety). The use of a conventional excipient medium may be contemplated within the scope of the present disclosure, except insofar as any conventional excipient medium may be incompatible with a substance or its derivatives, such as by producing any undesirable biological effect or otherwise interacting in a deleterious manner with any other component(s) of the pharmaceutical composition.

### Inactive Ingredients

[1082] In some embodiments, AAV formulations may comprise at least one excipient which is an inactive ingredient. As used herein, the term “inactive ingredient” refers to one or more agents that do not contribute to the activity of the pharmaceutical composition included in formulations. In some embodiments, all, none, or some of the inactive ingredients which may be used in the formulations of the present disclosure may be approved by the US Food and Drug Administration (FDA).

[1083] Formulations of AAV particles disclosed herein may include cations or anions. In some embodiments, the formulations include metal cations such as, but not limited to, Zn²⁺, Ca²⁺, Cu²⁺, Mg⁺, or combinations thereof. In some embodiments, formulations may include polymers or polynucleotides complexed with a metal cation (see, e.g., U.S. Pat. Nos. 6,265,389 and 6,555,525, the contents of each of which are herein incorporated by reference in their entirety).

### V. Uses and Applications

[1084] The compositions of the disclosure may be administered to a subject or used in the manufacture of a medicament for administration to a subject having a deficiency in the quantity or function of GCase protein or having a disease or condition associated with decreased GCase protein expression. In some embodiments, the disease is Parkinson Disease (PD), e.g., a PD with a mutation in a GBA gene. In certain embodiments, the AAV particles including GCase protein may be administered to a subject to treat Parkinson Disease, e.g., as PD associated with a mutation in a GBA gene. In some embodiments, administration of the AAV particles comprising viral genomes that encode GCase protein may protect central nervous system pathways from degeneration. The compositions and methods described herein are also useful for treating Gaucher disease (such as Type 1 or 2 GD) and Dementia with Lewy Bodies, and other GBA-related disorders.

[1085] In some embodiments, the delivery of the AAV particles may halt or slow progression of GBA-related disorders as measured by cholesterol accumulation in CNS cells (as determined, for example, by filipin staining and quantification). In certain embodiments, the delivery of the AAV particles improves symptoms of GBA-related disorders, including, for example, cognitive, muscular, physical, and sensory symptoms of GBA-related disorders.

[1086] In some embodiments, the present disclosure encompasses the delivery of pharmaceutical, prophylactic, diagnostic, or imaging compositions in combination with agents that may improve their bioavailability, reduce and/or modify their metabolism, and/or modify their distribution within the body.

[1087] In certain embodiments, the pharmaceutical compositions described herein are used as research tools, particularly in in vitro investigations using human cell lines such as HEK293T and in vivo testing in nonhuman primates which will occur prior to human clinical trials.

### CNS Diseases

[1088] The present disclosure provides a method for treating a disease, disorder and/or condition in a mammalian subject, including a human subject, comprising administering to the subject any of the viral particles e.g., AAV, AAV particle, or AAV genome that produces GCase protein described herein (i.e., viral genomes or “VG”) or administering to the subject a particle comprising said AAV particle or AAV genome, or administering to the subject any of the described compositions, including pharmaceutical compositions.

[1089] In some embodiments, AAV particles of the present disclosure, through delivery of a functional payload that is a therapeutic product comprising a GCase protein or variant thereof that can modulate the level or function of a gene product in the CNS.

[1090] A functional payload may alleviate or reduce symptoms that result from abnormal level and/or function of a gene product (e.g., an absence or defect in a protein) in a subject in need thereof or that otherwise confers a benefit to a CNS disorder in a subject in need thereof.

[1091] As non-limiting examples, companion or combination therapeutic products delivered by AAV particles of the present disclosure may include, but are not limited to, growth and trophic factors, cytokines, hormones, neurotransmitters, enzymes, anti-apoptotic factors, angiogenic factors, GCase proteins, and any protein known to be mutated in pathological disorders such as GBA-related disorders.

[1092] In some embodiments, AAV particles of the present disclosure may be used to treat diseases that are associated with impairments of the growth and development of the CNS, i.e., neurodevelopmental disorders. In some aspects, such neurodevelopmental disorders may be caused by genetic mutations.

[1093] In some embodiments, the neurological disorders may be functional neurological disorders with motor and/or sensory symptoms which have neurological origin in the CNS. As non-limiting examples, functional neurological disorders may be chronic pain, seizures, speech problems, involuntary movements, or sleep disturbances.

[1094] In some embodiments, the neurological or neuromuscular disease, disorder, and/or condition is GBA-related disorders. In some embodiments, the delivery of the AAV particles may halt or slow the disease progression of GBA-related disorders by 10%, 20%, 30%, 40%, 50%, 60%, 70%, 80%, 90%, 95%, or more than 95% using a known analysis method and comparator group for GBA-related disorders. As a non-limiting example, the delivery of the AAV particles may halt or slow progression of GBA-related disorders as measured by cholesterol accumulation in CNS cells (as determined, for example, by filipin staining and quantification).

[1095] In some embodiments, the AAV particles described herein increase the amount of GCase protein in a tissue by 1%, 2%, 3%, 4%, 5%, 6%, 7%, 8%, 9%, 10%, 11%, 12%, 13%, 14%, 15%, 16%, 17%, 18%, 19%, 20%, 25%, 30%, 35%, 40%, 45%, 50%, 55%, 60%, 65%, 70%, 75%, 80%, 85%, 90%, 95%, 97%, 99%, or more than 100%. In some embodiments, the AAV particle encoding a payload may increase the amount of GCase protein in a tissue to be comparable to (e.g., approximately the same as) the amount of GCase protein in the corresponding tissue of a healthy subject. In some embodiments, the AAV particle encoding a payload may increase the amount of GCase protein in a tissue effective to reduce one or more symptoms of a disease associated with decreased GCase protein expression or a deficiency in the quantity and/or function of GCase protein.

[1096] In some embodiments, the AAV particles and AAV vector genomes described herein, upon administration to subject or introduction to a target cell, increase GBA activity 2-3 fold over baseline GBA activity. In the case of subjects or target cells with deficient GBA activity, as in the case of subjects having a GBA-related disorder or cells or tissues harboring a mutation in a GBA gene, the AAV particles and AAV vector genomes described herein restore GBA activity to normal levels, as defined by GBA activity levels in subjects, tissues, and cells not afflicted with a GBA-related disorder or not harboring a GBA gene mutation. In some embodiments, the AAV particles and AAV vector genomes described herein effectively reduce α-synuclein levels in subjects having a GBA-related disorder or cells or tissues harboring a mutation in a GBA gene. In some embodiments, the AAV particles and AAV vector genomes described herein effectively prevent α-synuclein mediated pathology.

### Therapeutic Applications

[1097] The present disclosure additionally provides methods for treating non-infectious diseases and/or disorders in a mammalian subject, including a human subject, comprising administering to the subject any of the AAV particles or pharmaceutical compositions described herein. In some embodiments, non-infectious diseases and/or disorders treated according to the methods described herein include, but are not limited to, Parkinson's Disease (PD) (e.g., PD associated with a mutation in a GBA gene), Dementia with Lewy Bodies (DLB), Multiple System Atrophy (MSA), Decreased muscle mass, Spinal muscular atrophy (SMA), Alzheimer's disease (AD), Amyotrophic lateral sclerosis (ALS), Huntington's Disease (HD), Multiple sclerosis (MS), Stroke, Migraine, Pain, Neuropathies, Psychiatric disorders including schizophrenia, bipolar disorder, and autism, Cancer, ocular diseases, systemic diseases of the blood, heart and bone, Immune system and Autoimmune diseases and Inflammatory diseases.

[1098] The present disclosure provides a method for administering to a subject in need thereof, including a human subject, a therapeutically effective amount of the AAV particles of the invention to slow, stop or reverse disease progression. As a non-limiting example, disease progression may be measured by tests or diagnostic tool(s) known to those skilled in the art. As another non-limiting example, disease progression may be measured by change in the pathological features of the brain, CSF, or other tissues of the subject.

### Gaucher Disease

[1099] Homozygous or compound heterozygous GBA mutations lead to Gaucher disease (“GD”). See Sardi, S. Pablo, Jesse M. Cedarbaum, and Patrik Brundin. Movement Disorders 33.5 (2018): 684-696, the contents of which are incorporated by reference in their entirety. Gaucher disease is one of the most prevalent lysosomal storage disorders, with an estimated standardized birth incidence in the general population of between 0.4 to 5.8 individuals per 100,000. Heterozygous GBA mutations can lead to PD. Indeed, GBA mutations occur in 7-10% of total PD patients, making GBA mutations the most important genetic risk factor of PD. PD-GBA patients have reduced levels of lysosomal enzyme beta-glucocerebrosidase (GCase), which results in increased accumulations of glycosphingolipid glucosylceramide (GluCer), which in turn is correlated with exacerbated α-Synuclein aggregation and concomitant neurological symptoms. Gaucher disease and PD, as well as other lysosomal storage disorders including Lewy body diseases such as Dementia with Lewy Bodies, and related diseases, in some cases, share common etiology in the GBA gene. See Sidransky, E. and Lopez, G. Lancet Neurol. 2012 November, 11(11): 986-998, the contents of which are incorporated by reference in their entirety.

[1100] Gaucher disease can present as GD1 (Type 1 GD), which is the most common type of Gaucher disease among Asheknazi Jewish populations. In some embodiments, a Type I GD is a non-neuronopathic GD (e.g., does not affect the CNS, e.g., impacts cells and tissues outside of the CNS, e.g., a peripheral cell or tissue, e.g., a heart tissue, a liver tissue, a spleen tissue, or a combination thereof). The carrier frequency among Ashkenazi Jewish populations is approximately 1 in 12 individuals. GD2 (Type 2 GD) is characterized by acute neuronopathic GD (e.g., affects the CNS, e.g., cells and tissues of the brain, spinal cord, or both), and has an estimated incidence of 1 in 150,000 live births. GD2 is an early onset disease, typically presenting at about 1 year of age. Visceral involvement is extensive and severe, with numerous attributes of CNS disease, including oculomotor dysfunction, and bulbar palsy and generalized weakness, and progressive development delay. GD2 progresses to severe hypertonia, rigidity, opisthotonos, dysphagia, and seizures, typically resulting in death before age 2. GD3 (type 3 GD) is characterized by sub-acute neuropathic GD and as an estimated incidence of 1 in 200,000 live births. GD3 typically presents with pronounced neurologic signs, including a characteristic mask-like face, strabismus, supranuclear gaze palsy, and poor upward gaze initiation. GD2 and GD3 are each further characterized as associated with progressive encephalopathy, with developmental delay, cognitive impairment, progressive dementia, ataxia, myoclonus, and various gaze palsies. GD1, on the other hand, can have variable etiology, with visceromegaly, marrow and skeletal and pulmonary pathology, bleeding diatheses, and developmental delay. GD is further associated with increased rates of hematologic malignancies.

[1101] Deficiency of Glucocerebrosidase (GCase) is the underlying mechanism of GD. Low GCase activity leads to accumulation of glucocerebroside and other glycolipids within the lysosomes of macrophages. Accumulation can amount to about 20-fold to about 100-fold higher than in control cells or subjects without GCase deficiency. Pathologic lipid accumulation in macrophages accounts for <2% of additional tissue mass observed in the liver and spleen of GD patients. Additional increase in organ weight and volume is attributed to an inflammatory and hyperplastic cellular response.

[1102] Current treatments of GD include administration of recombinant enzymes, imiglucerase, taliglucerase alfa, and velaglucerase alfa. However, these intravenous enzyme therapies do not cross the blood brain barrier (BBB), and are not suitable for treatment of GD with Parkinson's disease or other neuronopathic forms of GD.

### Parkinson's Disease

[1103] Parkinson's Disease (PD) is a progressive disorder of the nervous system affecting especially the substantia nigra of the brain. PD develops as a result of the loss of dopamine producing brain cells. Typical early symptoms of PD include shaking or trembling of a limb, e.g. hands, arms, legs, feet and face. Additional characteristic symptoms are stiffness of the limbs and torso, slow movement or an inability to move, impaired balance and coordination, cognitional changes, and psychiatric conditions e.g. depression and visual hallucinations. PD has both familial and idiopathic forms and it is suggestion to be involved with genetic and environmental causes. PD affects more than 4 million people worldwide. In the US, approximately 60,000 cases are identified annually. Generally PD begins at the age of 50 or older. An early-onset form of the condition begins at age younger than 50, and juvenile-onset PD begins before age of 20.

[1104] Death of dopamine producing brain cells related to PD has been associated with aggregation, deposition and dysfunction of alpha-synuclein protein (see, e.g. Marques and Outeiro, 2012, Cell Death Dis. 3:e350, Jenner, 1989, J Neurol Neurosurg Psychiatry. Special Supplement, 22-28, and references therein). Studies have suggested that alpha-synuclein has a role in presynaptic signaling, membrane trafficking and regulation of dopamine release and transport. Alpha-synuclein aggregates, e.g. in forms of oligomers, have been suggested to be species responsible for neuronal dysfunction and death. Mutations of the alpha-synuclein gene (SNCA) have been identified in the familial forms of PD, but also environmental factors, e.g. neurotoxin affect alpha-synuclein aggregation. Other suggested causes of brain cell death in PD are dysfunction of proteasomal and lysosomal systems, reduced mitochondrial activity.

[1105] PD is related to other diseases related to alpha-synuclein aggregation, referred to as “synucleinopathies.” Such diseases include, but are not limited to, Parkinson's Disease Dementia (PDD), multiple system atrophy (MSA), dementia with Lewy bodies, juvenile-onset generalized neuroaxonal dystrophy (Hallervorden-Spatz disease), pure autonomic failure (PAF), neurodegeneration with brain iron accumulation type-1 (NBIA-1) and combined Alzheimer's and Parkinson's disease.

[1106] As of today, no cure or prevention therapy for PD has been identified. A variety of drug therapies available provide relief to the symptoms. Non-limiting examples of symptomatic medical treatments include carbidopa and levodoba combination reducing stiffness and slow movement, and anticholinergics to reduce trembling and stiffness. Other optional therapies include e.g. deep brain stimulation and surgery. There remains a need for therapy affecting the underlying pathophysiology. For example, antibodies targeting alpha-synuclein protein, or other proteins relevant for brain cell death in PD, may be used to prevent and/or treat PD.

[1107] In some embodiment, methods of the present invention may be used to treat subjects suffering from PD (e.g., PD associated with a mutation in a GBA gene) and other synucleinopathies. In some cases, methods of the present invention may be used to treat subjects suspected of developing PD (e.g., a PD associated with a mutation in a GBA gene) and other synucleinopathies.

[1108] AAV Particles and methods of using the AAV particles described herein may be used to prevent, manage and/or treat PD, e.g., a PD associated with a mutation in a GBA gene.

[1109] Approximately 5% of PD patients carry a GBA mutation: 10% of patients with type 1 GD develop PD before the age of 80 years, compared to about 3-4% in the normal population. Additionally, heterozygous or homozygous GBA mutations have been shown to increase the risk of PD 20-30 fold.

Dementia with Lewy Bodies

[1110] Dementia with Lewy Bodies (DLB), also known as diffuse Lewy body disease, is a form of progressive dementia, characterized by cognitive decline, fluctuating alertness and attention, visual hallucinations and parkinsonian motor symptoms. DLB may be inherited by an autosomal dominant pattern. DLB affects more than 1 million individuals in the US. The condition typically shows symptoms at the age of 50 or older.

[1111] DLB is caused by the abnormal build-up of Lewy bodies, aggregates of the alpha-synuclein protein, in the cytoplasm of neurons in the brain areas controlling memory and motor control. The pathophysiology of these aggregates is very similar to aggregates observed in Parkinson's disease and DLB also has similarities to Alzheimer's disease. Inherited DLB has been associated with gene mutations in GBAs.

[1112] As of today, there is no cure or prevention therapy for DLB. A variety of drug therapies available are aimed at managing the cognitive, psychiatric and motor control symptoms of the condition. Non-limiting examples of symptomatic medical treatments include e.g. acetylcholinesterase inhibitors to reduce cognitive symptoms, and levodopa to reduce stiffness and loss of movement. There remains a need for therapy affecting the underlying pathophysiology.

[1113] In some embodiments, methods of the present disclosure may be used to treat subjects suffering from DLB (e.g., a DLB associated with a mutation in a GBA gene). In some cases, the methods may be used to treat subjects suspected of developing DLB (e.g., a DLB associated with a mutation in a GBA gene).

[1114] AAV Particles and methods of using the AAV particles described in the present invention may be used to prevent, manage and/or treat DLB (e.g., a DLB associated with a mutation in a GBA gene).

### VI. Dosing and Administration

### Administration

[1115] In some aspects, the present disclosure provides administration and/or delivery methods for vectors and viral particles, e.g., AAV particles, encoding GCase protein or a variant thereof, for the prevention, treatment, or amelioration of diseases or disorders of the CNS. For example, administration of the AAV particles prevents, treats, or ameliorates GBA-related disorders. Thus, robust widespread GCase protein distribution throughout the CNS and periphery is desired for maximal efficacy. Particular target tissues for administration or delivery include CNS tissues, brain tissue, and, more specifically, caudate-putamen, thalamus, superior colliculus, cortex, and corpus collosum. Particular embodiments provide administration and/or delivery of the AAV particles and AAV vector genomes described herein to caudate-putamen and/or substantia nigra. Other particular embodiments provide administration and/or delivery of the AAV particles and AAV vector genomes described herein to thalamus.

[1116] The AAV particles of the present disclosure may be administered by any route which results in a therapeutically effective outcome. These include, but are not limited to, enteral (into the intestine), gastroenteral, epidural (into the dura matter), oral (by way of the mouth), transdermal, peridural, intracerebral (into the cerebrum), intracerebroventricular (into the cerebral ventricles), intracranial (into the skull), picutaneous (application onto the skin), intradermal, (into the skin itself), subcutaneous (under the skin), nasal administration (through the nose), intravenous (into a vein), intravenous bolus, intravenous drip, intraarterial (into an artery), intramuscular (into a muscle), intracardiac (into the heart), intraosseous infusion (into the bone marrow), intraparenchymal (into the substance of), intrathecal (into the spinal canal), intraperitoneal, (infusion or injection into the peritoneum), intravesicular infusion, intravitreal, (through the eye), intracavernous injection (into a pathologic cavity) intracavitary (into the base of the penis), intravaginal administration, intrauterine, extra-amniotic administration, transdermal (diffusion through the intact skin for systemic distribution), transmucosal (diffusion through a mucous membrane), transvaginal, insufflation (snorting), sublingual, sublabial, enema, eye drops (onto the conjunctiva), in ear drops, auricular (in or by way of the ear), buccal (directed toward the cheek), conjunctival, cutaneous, dental (to a tooth or teeth), electro-osmosis, endocervical, endosinusial, endotracheal, extracorporeal, hemodialysis, infiltration, interstitial, intra-abdominal, intra-amniotic, intra-articular, intrabiliary, intrabronchial, intrabursal, intracartilaginous (within a cartilage), intracaudal (within the cauda equine), intracisternal (within the cisterna magna cerebellomedularis), intracorneal (within the cornea), dental intracoronal, intracoronary (within the coronary arteries), intracorporus cavernosum (within the dilatable spaces of the corporus cavernosa of the penis), intradiscal (within a disc), intraductal (within a duct of a gland), intraduodenal (within the duodenum), intradural (within or beneath the dura), intraepidermal (to the epidermis), intraesophageal (to the esophagus), intragastric (within the stomach), intragingival (within the gingivae), intraileal (within the distal portion of the small intestine), intralesional (within or introduced directly to a localized lesion), intraluminal (within a lumen of a tube), intralymphatic (within the lymph), intramedullary (within the marrow cavity of a bone), intrameningeal (within the meninges), intraocular (within the eye), intraovarian (within the ovary), intrapericardial (within the pericardium), intrapleural (within the pleura), intraprostatic (within the prostate gland), intrapulmonary (within the lungs or its bronchi), intrasinal (within the nasal or periorbital sinuses), intraspinal (within the vertebral column), intrasynovial (within the synovial cavity of a joint), intratendinous (within a tendon), intratesticular (within the testicle), intrathecal (within the cerebrospinal fluid at any level of the cerebrospinal axis), intrathoracic (within the thorax), intratubular (within the tubules of an organ), intratumor (within a tumor), intratympanic (within the aurus media), intravascular (within a vessel or vessels), intraventricular (within a ventricle), iontophoresis (by means of electric current where ions of soluble salts migrate into the tissues of the body), irrigation (to bathe or flush open wounds or body cavities), laryngeal (directly upon the larynx), nasogastric (through the nose and into the stomach), occlusive dressing technique (topical route administration which is then covered by a dressing which occludes the area), ophthalmic (to the external eye), oropharyngeal (directly to the mouth and pharynx), parenteral, percutaneous, periarticular, peridural, perineural, periodontal, rectal, respiratory (within the respiratory tract by inhaling orally or nasally for local or systemic effect), retrobulbar (behind the pons or behind the eyeball), soft tissue, subarachnoid, subconjunctival, submucosal, subpial, topical, transplacental (through or across the placenta), transtracheal (through the wall of the trachea), transtympanic (across or through the tympanic cavity), ureteral (to the ureter), urethral (to the urethra), vaginal, caudal block, diagnostic, nerve block, biliary perfusion, cardiac perfusion, photopheresis or spinal.

[1117] In some embodiments, AAV particles of the present disclosure are administered so as to be delivered to a target cell or tissue. Delivery to a target cell results in GCase protein expression. A target cell may be any cell in which it is considered desirable to increase GCase protein expression levels. A target cell may be a CNS cell. Non-limiting examples of such cells and/or tissues include, dorsal root ganglia and dorsal columns, proprioceptive sensory neurons, Clark's column, gracile and cuneate nuclei, cerebellar dentate nucleus, corticospinal tracts and the cells comprising the same, Betz cells, and cells of the heart.

[1118] In some embodiments, compositions may be administered in a way that allows them to cross the blood-brain barrier, vascular barrier, or other epithelial barrier.

[1119] In some embodiments, delivery of GCase protein by adeno-associated virus (AAV) particles to cells of the central nervous system (e.g., parenchyma) comprises infusion into cerebrospinal fluid (CSF). CSF is produced by specialized ependymal cells that comprise the choroid plexus located in the ventricles of the brain. CSF produced within the brain then circulates and surrounds the central nervous system including the brain and spinal cord. CSF continually circulates around the central nervous system, including the ventricles of the brain and subarachnoid space that surrounds both the brain and spinal cord, while maintaining a homeostatic balance of production and reabsorption into the vascular system. The entire volume of CSF is replaced approximately four to six times per day or approximately once every four hours, though values for individuals may vary.

[1120] In some embodiments, the AAV particles may be delivered by systemic delivery. In some embodiments, the systemic delivery may be by intravascular administration. In some embodiments, the systemic delivery may be by intravenous (IV) administration.

[1121] In some embodiments, the AAV particles may be delivered by intravenous delivery.

[1122] In some embodiments, the AAV particle is administered to the subject via focused ultrasound (FUS), e.g., coupled with the intravenous administration of microbubbles (FUS-MB), or MRI-guided FUS coupled with intravenous administration, e.g., as described in Terstappen et al. (Nat Rev Drug Discovery, https://doi.org/10.1038/s41573-021-00139-y (2021)), Burgess et al. (Expert Rev Neurother. 15(5): 477-491 (2015)), and/or Hsu et al. (PLOS One 8(2): 1-8), the contents of which are incorporated herein by reference in its entirety.

[1123] In some embodiments, the AAV particles may be delivered by injection into the CSF pathway. Non-limiting examples of delivery to the CSF pathway include intrathecal and intracerebroventricular administration.

[1124] In some embodiments, the AAV particles may be delivered by thalamic delivery.

[1125] In some embodiments, the AAV particles may be delivered by intracerebral delivery.

[1126] In some embodiments, the AAV particles may be delivered by intracardiac delivery.

[1127] In some embodiments, the AAV particles may be delivered by intracranial delivery.

[1128] In some embodiments, the AAV particles may be delivered by intra cisterna magna (ICM) delivery.

[1129] In some embodiments, the AAV particles may be delivered by direct (intraparenchymal) injection into an organ (e.g., CNS (brain or spinal cord)). In some embodiments, the intraparenchymal delivery may be to any region of the brain or CNS.

[1130] In some embodiments, the AAV particles may be delivered by intrastriatal injection.

[1131] In some embodiments, the AAV particles may be delivered into the putamen.

[1132] In some embodiments, the AAV particles may be delivered into the spinal cord.

[1133] In some embodiments, the AAV particles of the present disclosure may be administered to the ventricles of the brain.

[1134] In some embodiments, the AAV particles of the present disclosure may be administered to the ventricles of the brain by intracerebroventricular delivery.

[1135] In some embodiments, the AAV particles of the present disclosure may be administered by intramuscular delivery.

[1136] In some embodiments, the AAV particles of the present disclosure are administered by more than one route described above. As a non-limiting example, the AAV particles may be administered by intravenous delivery and thalamic delivery.

[1137] In some embodiments, the AAV particles of the present disclosure are administered by more than one route described above. As a non-limiting example, the AAV particles may be administered by intravenous delivery and intracerebral delivery.

[1138] In some embodiments, the AAV particles of the present disclosure are administered by more than one route described above. As a non-limiting example, the AAV particles may be administered by intravenous delivery and intracranial delivery.

[1139] In some embodiments, the AAV particles of the present disclosure are administered by more than one route described above. In some embodiments, the AAV particles of the present disclosure may be delivered by intrathecal and intracerebroventricular administration.

[1140] In some embodiments, the AAV particles may be delivered to a subject to improve and/or correct mitochondrial dysfunction.

[1141] In some embodiments, the AAV particles may be delivered to a subject to preserve neurons. The neurons may be primary and/or secondary sensory neurons. In some embodiments, AAV particles are delivered to dorsal root ganglia and/or neurons thereof.

[1142] In some embodiments, administration of the AAV particles may preserve and/or correct function in the sensory pathways.

[1143] In some embodiments, the AAV particles may be delivered via intravenous (IV), intracerebroventricular (ICV), intraparenchymal, and/or intrathecal (IT) infusion and the therapeutic agent may also be delivered to a subject via intramuscular (IM) limb infusion in order to deliver the therapeutic agent to the skeletal muscle. Delivery of AAVs by intravascular limb infusion is described by Gruntman and Flotte, Human Gene Therapy Clinical Development, 2015, 26(3), 159-164, the contents of which are herein incorporated by reference in their entirety.

[1144] In some embodiments, delivery of viral vector pharmaceutical compositions in accordance with the present disclosure to cells of the central nervous system (e.g., parenchyma) comprises a rate of delivery defined by VG/hour=mL/hour*VG/mL, wherein VG is viral genomes, VG/mL is composition concentration, and mL/hour is rate of infusion.

[1145] In some embodiments, delivery of AAV particle pharmaceutical compositions in accordance with the present disclosure to cells of the central nervous system (e.g., parenchyma) comprises infusion of up to 1 mL. In some embodiments, delivery of viral vector pharmaceutical compositions in accordance with the present disclosure to cells of the central nervous system (e.g., parenchyma) may comprise infusion of 0.0001, 0.0002, 0.001, 0.002, 0.003, 0.004, 0.005, 0.008, 0.010, 0.015, 0.020, 0.025, 0.030, 0.040, 0.050, 0.060, 0.070, 0.080, 0.090, 0.1, 0.2, 0.3, 0.4, 0.5, 0.6, 0.7, 0.8, or 0.9 mL.

[1146] In some embodiments, delivery of AAV particle pharmaceutical compositions in accordance with the present disclosure to cells of the central nervous system (e.g., parenchyma) comprises infusion of between about 1 mL to about 120 mL. In some embodiments, delivery of viral vector pharmaceutical compositions in accordance with the present disclosure to cells of the central nervous system (e.g., parenchyma) may comprise an infusion of 0.1, 1, 1.1, 1.2, 1.3, 1.4, 1.5, 1.6, 1.7, 1.8, 1.9, 2, 3, 4, 5, 6, 7, 8, 9, 10, 11, 12, 13, 14, 15, 16, 17, 18, 19, 20, 21, 22, 23, 24, 25, 26, 27, 28, 29, 30, 31, 32, 33, 34, 35, 36, 37, 38, 39, 40, 41, 42, 43, 44, 45, 46, 47, 48, 49, 50, 51, 52, 53, 54, 55, 56, 57, 58, 59, 60, 61, 62, 63, 64, 65, 66, 67, 68, 69, 70, 71, 72, 73, 74, 75, 76, 77, 78, 79, 80, 81, 82, 83, 84, 85, 86, 87, 88, 89, 90, 91, 92, 93, 94, 95, 96, 97, 98, 99, 100, 101, 102, 103, 104, 105, 106, 107, 108, 109, 110, 111, 112, 113, 114, 115, 116, 117, 118, 119, or 120 mL. In some embodiments delivery of AAV particles to cells of the central nervous system (e.g., parenchyma) comprises infusion of at least 3 mL. In some embodiments, delivery of AAV particles to cells of the central nervous system (e.g., parenchyma) consists of infusion of 3 mL. In some embodiments, delivery of AAV particles to cells of the central nervous system (e.g., parenchyma) comprises infusion of at least 10 mL. In some embodiments, delivery of AAV particles to cells of the central nervous system (e.g., parenchyma) consists of infusion of 10 mL.

[1147] In some embodiments, the volume of the AAV particle pharmaceutical composition delivered to the cells of the central nervous system (e.g., parenchyma) of a subject is 2 μl, 20 μl, 50 μl, 80 μl, 100 μl, 200 μl, 300 μl, 400 μl, 500 μl, 600 μl, 700 μl, 800 μl, 900 μl, 1000 μl, 1100 μl, 1200 μl, 1300 μl, 1400 μl, 1500 μl, 1600 μl, 1700 μl, 1800 μl, 1900 μl, 2000 μl, or more than 2000 μl.

[1148] In some embodiments, the volume of the AAV particle pharmaceutical composition delivered to a region in both hemispheres of a subject brain is 2 μl, 20 μl, 50 μl, 80 μl, 100 μl, 200 μl, 300 μl, 400 μl, 500 μl, 600 μl, 700 μl, 800 μl, 900 μl, 1000 μl, 1100 μl, 1200 μl, 1300 μl, 1400 μl, 1500 μl, 1600 μl, 1700 μl, 1800 μl, 1900 μl, 2000 μl, or more than 2000 μl. In some embodiments, the volume delivered to a region in both hemispheres is 200 μl. As another non-limiting example, the volume delivered to a region in both hemispheres is 900 μl. As yet another non-limiting example, the volume delivered to a region in both hemispheres is 1800 μl.

[1149] In certain embodiments, AAV particle or viral vector pharmaceutical compositions in accordance with the present disclosure may be administered at about 10 to about 600 μl/site, about 50 to about 500 μl/site, about 100 to about 400 μl/site, about 120 to about 300 μl/site, about 140 to about 200 μl/site, or about 160 μl/site.

[1150] In some embodiments, the total volume delivered to a subject may be split between one or more administration sites e.g., 1, 2, 3, 4, 5, or more than 5 sites. In some embodiments, the total volume is split between administration to the left and right hemisphere.

### Delivery of AAV Particles

[1151] In some embodiments, the AAV particles or pharmaceutical compositions of the present disclosure may be administered or delivered using the methods for treatment of disease described in U.S. Pat. No. 8,999,948, or International Publication No. WO2014178863, the contents of which are herein incorporated by reference in their entirety.

[1152] In some embodiments, the AAV particles or pharmaceutical compositions of the present disclosure may be administered or delivered using the methods for delivering gene therapy in Alzheimer's Disease or other neurodegenerative conditions as described in US Application No. 20150126590, the contents of which are herein incorporated by reference in their entirety.

[1153] In some embodiments, the AAV particles or pharmaceutical compositions of the present disclosure may be administered or delivered using the methods for delivery of a CNS gene therapy as described in U.S. Pat. Nos. 6,436,708, and 8,946,152, and International Publication No. WO2015168666, the contents of which are herein incorporated by reference in their entirety.

[1154] In some embodiments, the AAV particles of the present disclosure may be administered or delivered using the methods for the delivery of AAV virions described in European Patent Application No. EP1857552, the contents of which are herein incorporated by reference in their entirety.

[1155] In some embodiments, the AAV particle or pharmaceutical compositions of the present disclosure may be administered or delivered using the methods for delivering proteins using AAV vectors described in European Patent Application No. EP2678433, the contents of which are herein incorporated by reference in their entirety.

[1156] In some embodiments, the viral vector encoding GCase protein may be administered or delivered using the methods for delivering DNA molecules using AAV vectors described in U.S. Pat. No. 5,858,351, the contents of which are herein incorporated by reference in their entirety.

[1157] In some embodiments, the AAV particle or pharmaceutical compositions of the present disclosure may be administered or delivered using the methods for delivering DNA to the bloodstream described in U.S. Pat. No. 6,211,163, the contents of which are herein incorporated by reference in their entirety.

[1158] In some embodiments, the viral vector encoding GCase protein may be administered or delivered using the methods for delivering AAV virions described in U.S. Pat. No. 6,325,998, the contents of which are herein incorporated by reference in their entirety.

[1159] In some embodiments, the viral vector encoding GCase protein may be administered or delivered using the methods for delivering DNA to muscle cells described in U.S. Pat. No. 6,335,011, the contents of which are herein incorporated by reference in their entirety.

[1160] In some embodiments, the viral vector encoding GCase protein may be administered or delivered using the methods for delivering DNA to muscle cells and tissues described in U.S. Pat. No. 6,610,290, the contents of which are herein incorporated by reference in their entirety.

[1161] In some embodiments, the viral vector encoding GCase protein may be administered or delivered using the methods for delivering DNA to muscle cells described in U.S. Pat. No. 7,704,492, the contents of which are herein incorporated by reference in their entirety.

[1162] In some embodiments, the viral vector encoding GCase protein may be administered or delivered using the methods for delivering a payload to skeletal muscles described in U.S. Pat. No. 7,112,321, the contents of which are herein incorporated by reference in their entirety.

[1163] In some embodiments, the AAV particle or pharmaceutical compositions of the present disclosure may be administered or delivered using the methods for delivering a payload to the central nervous system described in U.S. Pat. No. 7,588,757, the contents of which are herein incorporated by reference in their entirety.

[1164] In some embodiments, the AAV particle or pharmaceutical compositions of the present disclosure may be administered or delivered using the methods for delivering a payload described in U.S. Pat. No. 8,283,151, the contents of which are herein incorporated by reference in their entirety.

[1165] In some embodiments, the AAV particle or pharmaceutical compositions of the present disclosure may be administered or delivered using the methods for delivering a payload for the treatment of Alzheimer disease described in U.S. Pat. No. 8,318,687, the contents of which are herein incorporated by reference in their entirety.

[1166] In some embodiments, the AAV particle or pharmaceutical compositions of the present disclosure may be administered or delivered using the methods for delivering a payload described in International Patent Publication No. WO2012144446, the contents of which are herein incorporated by reference in their entirety.

[1167] In some embodiments, the AAV particle or pharmaceutical compositions of the present disclosure may be administered or delivered using the methods for delivering a payload using a glutamic acid decarboxylase (GAD) delivery vector described in International Patent Publication No. WO2001089583, the contents of which are herein incorporated by reference in their entirety.

[1168] In some embodiments, the AAV particle or pharmaceutical compositions of the present disclosure may be administered or delivered using the methods for delivering a payload to neural cells described in International Patent Publication No. WO2012057363, the contents of which are herein incorporated by reference in their entirety.

[1169] In some embodiments, the AAV particle or pharmaceutical compositions of the present disclosure may be administered or delivered using the methods for delivering a payload described in International Patent Publication No. WO2001096587, the contents of which are herein incorporated by reference in their entirety.

[1170] In some embodiments, the AAV particle or pharmaceutical compositions of the present disclosure may be administered or delivered using the methods for delivering a payload to muscle tissue described in International Patent Publication No. WO2002014487, the contents of which are herein incorporated by reference in their entirety.

[1171] In some embodiments, a catheter may be used to administer the AAV particles. In certain embodiments, the catheter or cannula may be located at more than one site in the spine for multi-site delivery. The viral particles encoding may be delivered in a continuous and/or bolus infusion. Each site of delivery may be a different dosing regimen or the same dosing regimen may be used for each site of delivery. In some embodiments, the sites of delivery may be in the cervical and the lumbar region. In some embodiments, the sites of delivery may be in the cervical region. In some embodiments, the sites of delivery may be in the lumbar region.

[1172] In some embodiments, a subject may be analyzed for spinal anatomy and pathology prior to delivery of the AAV particles described herein. As a non-limiting example, a subject with scoliosis may have a different dosing regimen and/or catheter location compared to a subject without scoliosis.

[1173] In some embodiments, the delivery method and duration is chosen to provide broad transduction in the spinal cord. In some embodiments, intrathecal delivery is used to provide broad transduction along the rostral-caudal length of the spinal cord. In some embodiments, multi-site infusions provide a more uniform transduction along the rostral-caudal length of the spinal cord.

### Delivery to Cells

[1174] In some aspects, the present disclosure provides a method of delivering to a cell or tissue any of the above-described AAV particles, comprising contacting the cell or tissue with said AAV particle or contacting the cell or tissue with a formulation comprising said AAV particle, or contacting the cell or tissue with any of the described compositions, including pharmaceutical compositions. The method of delivering the AAV particle to a cell or tissue can be accomplished in vitro, ex vivo, or in vivo.

### Delivery to Subjects

[1175] In some aspects, the present disclosure additionally provides a method of delivering to a subject, including a mammalian subject, any of the above-described AAV particles comprising administering to the subject said AAV particle, or administering to the subject a formulation comprising said AAV particle, or administering to the subject any of the described compositions, including pharmaceutical compositions.

[1176] In some embodiments, the AAV particles may be delivered to bypass anatomical blockages such as, but not limited to the blood brain barrier.

[1177] In some embodiments, the AAV particles may be formulated and delivered to a subject by a route which increases the speed of drug effect as compared to oral delivery.

[1178] In some embodiments, the AAV particles may be delivered by a method to provide uniform transduction of the spinal cord and dorsal root ganglion (DRG). In some embodiments, the AAV particles may be delivered using intrathecal infusion.

[1179] In some embodiments, a subject may be administered the AAV particles described herein using a bolus infusion. As used herein, a “bolus infusion” means a single and rapid infusion of a substance or composition.

[1180] In some embodiments, the AAV particles encoding GCase protein may be delivered in a continuous and/or bolus infusion. Each site of delivery may be a different dosing regimen or the same dosing regimen may be used for each site of delivery. As a non-limiting example, the sites of delivery may be in the cervical and the lumbar region. As another non-limiting example, the sites of delivery may be in the cervical region. As another non-limiting example, the sites of delivery may be in the lumbar region.

[1181] In some embodiments, the AAV particles may be delivered to a subject via a single route administration.

[1182] In some embodiments, the AAV particles may be delivered to a subject via a multi-site route of administration. For example, a subject may be administered the AAV particles at 2, 3, 4, 5, or more than 5 sites.

[1183] In some embodiments, a subject may be administered the AAV particles described herein using sustained delivery over a period of minutes, hours or days. The infusion rate may be changed depending on the subject, distribution, formulation or another delivery parameter known to those in the art.

[1184] In some embodiments, if continuous delivery (continuous infusion) of the AAV particles is used, the continuous infusion may be for 1 hour, 2, hours, 3 hours, 4 hours, 5 hours, 6 hours, 7 hours, 8 hours, 9 hours, 10 hours, 11 hours, 12 hours, 13 hours, 14 hours, 15 hours, 16 hours, 17 hours, 18 hours, 19 hours, 20 hours, 21 hours, 22 hours, 23 hours, 24 hours, or more than 24 hours.

[1185] In some embodiments, the intracranial pressure may be evaluated prior to administration. The route, volume, AAV particle concentration, infusion duration and/or vector titer may be optimized based on the intracranial pressure of a subject.

[1186] In some embodiments, the AAV particles may be delivered by systemic delivery. In some embodiments, the systemic delivery may be by intravascular administration.

[1187] In some embodiments, the AAV particles may be delivered by injection into the CSF pathway. Non-limiting examples of delivery to the CSF pathway include intrathecal and intracerebroventricular administration.

[1188] In some embodiments, the AAV particles may be delivered by direct (intraparenchymal) injection into the substance of an organ, e.g., one or more regions of the brain.

[1189] In some embodiments, the AAV particles may be delivered by subpial injection into the spinal cord. For example, subjects may be placed into a spinal immobilization apparatus. A dorsal laminectomy may be performed to expose the spinal cord. Guiding tubes and XYZ manipulators may be used to assist catheter placement. Subpial catheters may be placed into the subpial space by advancing the catheter from the guiding tube and AAV particles may be injected through the catheter (Miyanohara et al., Mol Ther Methods Clin Dev. 2016; 3: 16046). In some cases, the AAV particles may be injected into the cervical subpial space. In some cases, the AAV particles may be injected into the thoracic subpial space.

[1190] In some embodiments, the AAV particles may be delivered by direct injection to the CNS of a subject. In some embodiments, direct injection is intracerebral injection, intraparenchymal injection, intrathecal injection, intra-cisterna magna injection, or any combination thereof. In some embodiments, direct injection to the CNS of a subject comprises convection enhanced delivery (CED). In some embodiments, administration comprises peripheral injection. In some embodiments, peripheral injection is intravenous injection.

[1191] In some embodiments, the AAV particles may be delivered to a subject in order to increase the GCase protein levels in the caudate-putamen, thalamus, superior colliculus, cortex, and/or corpus callosum as compared to endogenous levels. The increase may be 0.1× to 5×, 0.5× to 5×, 1× to 5×, 2× to 5×, 3× to 5×, 4× to 5×, 0.1× to 4×, 0.5× to 4×, 1× to 4×, 2× to 4×, 3× to 4×, 0.1× to 3×, 0.5× to 3×, 1× to 3×, 2× to 3×, 0.1× to 2×, 0.5× to 2×, 0.1× to 1×, 0.5× to 1×, 0.1× to 0.5×, 1× to 2×, 0.1×, 0.2×, 0.3×, 0.4×, 0.5×, 0.6×, 0.7×, 0.8×, 0.9×, 1.0×, 1.1×, 1.2×, 1.3×, 1.4×, 1.5×, 1.6×, 1.7×, 1.8×, 1.9×, 2.0×, 2.1×, 2.2×, 2.3×, 2.4×, 2.5×, 2.6×, 2.7×, 2.8×, 2.9×, 3.0×, 3.1×, 3.2×, 3.3×, 3.4×, 3.5×, 3.6×, 3.7×, 3.8×, 3.9×, 4.0×, 4.1×, 4.2×, 4.3×, 4.4×, 4.5×, 4.6×, 4.7×, 4.8×, 4.9× or more than 5× as compared to endogenous levels.

[1192] In some embodiments, the AAV particles may be delivered to a subject in order to increase the GCase protein levels in the caudate, putamen, thalamus, superior colliculus, cortex, and/or corpus callosum by transducing cells in these CNS regions. Transduction may also be referred to as the amount of cells that are positive for GCase protein. The transduction may be greater than or equal to 1%, 5%, 10%, 15%, 20%, 25%, 30%, 35%, 40%, 45%, 50%, 55%, 60%, 65%, 70%, 75%, 80%, 85%, 90%, 95%, or 99% of cells in these CNS regions.

[1193] In some embodiments, delivery of AAV particles comprising a viral genome encoding GCase protein described herein to neurons in the caudate-putamen, thalamus, superior colliculus, cortex, and/or corpus callosum will lead to an increased expression of GCase protein. The increased expression may lead to improved survival and function of various cell types in these CNS regions and subsequent improvement of GBA-related disorder symptoms.

[1194] In particular embodiments, the AAV particles may be delivered to a subject in order to establish widespread distribution of the GCase throughout the nervous system by administering the AAV particles to the thalamus of the subject.

[1195] Specifically, in some embodiments, the increased expression of GCase protein may lead to improved gait, sensory capability, coordination of movement and strength, functional capacity, cognition, and/or quality of life.

### Dosing

[1196] In some aspects, the present disclosure provides methods comprising administering viral vectors and their payloads in accordance with the disclosure to a subject in need thereof. Viral vector pharmaceutical, imaging, diagnostic, or prophylactic compositions thereof, may be administered to a subject using any amount and any route of administration effective for preventing, treating, diagnosing, or imaging a disease, disorder, and/or condition (e.g., a disease, disorder, and/or condition associated with decreased GCase protein expression or a deficiency in the quantity and/or function of GCase protein). In some embodiments, the disease, disorder, and/or condition is GBA-related disorders. The exact amount required will vary from subject to subject, depending on the species, age, and general condition of the subject, the severity of the disease, the particular composition, its mode of administration, its mode of activity, and the like. Compositions in accordance with the disclosure are typically formulated in unit dosage form for ease of administration and uniformity of dosage. It will be understood, however, that the total daily usage of the compositions of the present disclosure may be decided by the attending physician within the scope of sound medical judgment. The specific therapeutically effective, prophylactically effective, or appropriate imaging dose level for any particular patient will depend upon a variety of factors including the disorder being treated and the severity of the disorder, the activity of the specific compound employed; the specific composition employed; the age, body weight, general health, sex, and diet of the patient; the time of administration, route of administration, and rate of excretion of the specific peptide(s) employed; the duration of the treatment; drugs used in combination or coincidental with the specific compound employed; and like factors well known in the medical arts.

[1197] In certain embodiments, AAV particle pharmaceutical compositions in accordance with the present disclosure may be administered at dosage levels sufficient to deliver GCase protein from about 0.0001 mg/kg to about 100 mg/kg, from about 0.001 mg/kg to about 0.05 mg/kg, from about 0.005 mg/kg to about 0.05 mg/kg, from about 0.001 mg/kg to about 0.005 mg/kg, from about 0.05 mg/kg to about 0.5 mg/kg, from about 0.01 mg/kg to about 50 mg/kg, from about 0.1 mg/kg to about 40 mg/kg, from about 0.5 mg/kg to about 30 mg/kg, from about 0.01 mg/kg to about 10 mg/kg, from about 0.1 mg/kg to about 10 mg/kg, or from about 1 mg/kg to about 25 mg/kg, of subject body weight per day, one or more times a day, to obtain the desired therapeutic, diagnostic, prophylactic, or imaging effect. It will be understood that the above dosing concentrations may be converted to VG or viral genomes per kg or into total viral genomes administered by one of skill in the art.

[1198] In certain embodiments, the desired dosage may be delivered using multiple administrations (e.g., two, three, four, five, six, seven, eight, nine, ten, eleven, twelve, thirteen, fourteen, or more administrations). When multiple administrations are employed, split dosing regimens such as those described herein may be used. As used herein, a “split dose” is the division of single unit dose or total daily dose into two or more doses, e.g., two or more administrations of the single unit dose. As used herein, a “single unit dose” is a dose of any therapeutic composition administered in one dose/at one time/single route/single point of contact, i.e., single administration event. In some embodiments, a single unit dose is provided as a discrete dosage form (e.g., a tablet, capsule, patch, loaded syringe, vial, etc.). As used herein, a “total daily dose” is an amount given or prescribed in 24-hour period. It may be administered as a single unit dose. The viral particles may be formulated in buffer only or in a formulation described herein.

[1199] A pharmaceutical composition described herein can be formulated into a dosage form described herein, such as a topical, intranasal, pulmonary, intratracheal, or injectable (e.g., intravenous, intraocular, intravitreal, intramuscular, intracardiac, intraperitoneal, and/or subcutaneous).

[1200] In some embodiments, delivery of the AAV particles described herein results in minimal serious adverse events (SAEs) as a result of the delivery of the AAV particles.

[1201] In some embodiments, delivery of AAV particle pharmaceutical compositions in accordance with the present disclosure to cells of the central nervous system (e.g., parenchyma) may comprise a total concentration between about 1×10⁶ VG/mL and about 1×10¹⁶ VG/mL. In some embodiments, delivery may comprise a composition concentration of about 1×10⁶, 2×10⁶, 3×10⁶, 4×10⁶, 5×10⁶, 6×10⁶, 7×10⁶, 8×10⁶, 9×10⁶, 1×10⁷, 2×10⁷, 3×10⁷, 4×10⁷, 5×10⁷, 6×10⁷, 7×10⁷, 8×10⁷, 9×10⁷, 1×10⁸, 2×10⁸, 3×10⁸, 4×10⁸, 5×10⁸, 6×10⁸, 7×10⁸, 8×10⁸, 9×10⁸, 1×10⁹, 2×10⁹, 3×10⁹, 4×10⁹, 5×10⁹, 6×10⁹, 7×10⁹, 8×10⁹, 9×10⁹, 1×10¹⁰, 2×10¹⁰, 3×10¹⁰, 4×10¹⁰, 5×10¹⁰, 6×10¹⁰, 7×10¹⁰, 8×10¹⁰, 9×10¹⁰, 1×10¹¹, 1.6×10¹¹, 1.8×10¹¹, 2×10¹¹, 3×10¹¹, 4×10¹¹, 5×10¹¹, 5.5×10¹¹, 6×10¹¹, 7×10¹¹, 8×10¹¹, 9×10¹¹, 0.8×10¹², 0.83×10¹², 1×10¹², 1.1×10¹², 1.2×10¹², 1.3×10¹², 1.4×10¹², 1.5×10¹², 1.6×10¹², 1.7×10¹², 1.8×10¹², 1.9×10¹², 2×10¹², 2.1×10¹², 2.2×10¹², 2.3×10¹², 2.4×10¹², 2.5×10¹², 2.6×10¹², 2.7×10¹², 2.8×10¹², 2.9×10¹², 3×10¹², 3.1×10¹², 3.2×10¹², 3.3×10¹², 3.4×10¹², 3.5×10¹², 3.6×10¹², 3.7×10¹², 3.8×10¹², 3.9×10¹², 4×10¹², 4.1×10¹², 4.2×10¹², 4.3×10¹², 4.4×10¹², 4.5×10¹², 4.6×10¹², 4.7×10¹², 4.8×10¹², 4.9×10¹², 5×10¹², 6×10¹², 7×10¹², 8×10¹², 9×10¹², 1×10¹³, 2×10¹³, 2.3×10¹³, 3×10¹³, 4×10¹³, 5×10¹³, 6×10¹³, 7×10¹³, 8×10¹², 9×10¹³, 1×10¹⁴, 1.9×10¹⁴, 2×10¹⁴, 3×10¹⁴, 4×10¹⁴, 5×10¹⁴, 6×10¹⁴, 7×10¹⁴, 8×10¹⁴, 9×10¹⁴, 1×10¹⁵, 2×10¹⁵, 3×10¹⁵, 4×10¹⁵, 5×10¹⁵, 6×10¹⁵, 7×10¹⁵, 8×10¹⁵, 9×10¹⁵, or 1×10¹⁶ VG/mL. In some embodiments, the concentration of the viral vector in the composition is 1×10¹³ VG/mL. In some embodiments, the concentration of the viral vector in the composition is 1.1×10¹² VG/mL. In some embodiments, the concentration of the viral vector in the composition is 3.7×10¹² VG/mL. In some embodiments, the concentration of the viral vector in the composition is 8×10¹¹ VG/mL. In some embodiments, the concentration of the viral vector in the composition is 2.6×10¹² VG/mL. In some embodiments, the concentration of the viral vector in the composition is 4.9×10¹² VG/mL. In some embodiments, the concentration of the viral vector in the composition is 0.8×10¹² VG/mL. In some embodiments, the concentration of the viral vector in the composition is 0.83×10¹² VG/mL. In some embodiments, the concentration of the viral vector in the composition is the maximum final dose which can be contained in a vial. In some embodiments, the concentration of the viral vector in the composition is 1.6×10¹¹ VG/mL. In some embodiments, the concentration of the viral vector in the composition is 5×10¹¹ VG/mL. In some embodiments, the concentration of the viral vector in the composition is 2.3×10¹¹ VG/mL. In some embodiments, the concentration of the viral vector in the composition is 1.9×10¹⁴ VG/mL.

[1202] In some embodiments, delivery of AAV particle pharmaceutical compositions in accordance with the present disclosure to cells of the central nervous system (e.g., parenchyma) may comprise a total concentration per subject between about 1×10⁶ VG and about 1×10¹⁶ VG. In some embodiments, delivery may comprise a composition concentration of about 1×10⁶, 2×10⁶, 3×10⁶, 4×10⁶, 5×10⁶, 6×10⁶, 7×10⁶, 8×10⁶, 9×10⁶, 1×10⁷, 2×10⁷, 3×10⁷, 4×10⁷, 5×10⁷, 6×10⁷, 7×10⁷, 8×10⁷, 9×10⁷, 1×10⁸, 2×10⁸, 3×10⁸, 4×10⁸, 5×10⁸, 6×10⁸, 7×10⁸, 8×10⁸, 9×10⁸, 1×10⁹, 2×10⁹, 3×10⁹, 4×10⁹, 5×10⁹, 6×10⁹, 7×10⁹, 8×10⁹, 9×10¹⁰, 1×10¹⁰, 2×10¹⁰, 3×10¹⁰, 4×10¹⁰, 5×10¹⁰, 6×10¹⁰, 7×10¹⁰, 8×10¹⁰, 9×10¹⁰, 1×10¹¹, 1.6×10¹¹, 2×10¹¹, 2.1×10¹¹, 2.2×10¹¹, 2.3×10¹¹, 2.4×10¹¹, 2.5×10¹¹, 2.6×10¹¹, 2.7×10¹¹, 2.8×10¹¹, 2.9×10¹¹, 3×10¹¹, 4×10¹¹, 4.6×10¹¹, 5×10¹¹, 6×10¹¹, 7×10¹¹, 7.1×10¹¹, 7.2×10¹¹, 7.3×10¹¹, 7.4×10¹¹, 7.5×10¹¹, 7.6×10¹¹, 7.7×10¹¹, 7.8×10¹¹, 7.9×10¹¹, 8×10¹¹, 9×10¹¹, 1×10¹², 1.1×10¹², 1.2×10¹², 1.3×10¹², 1.4×10¹², 1.5×10¹², 1.6×10¹², 1.7×10¹², 1.8×10¹², 1.9×10¹², 2×10¹², 2.3×10¹², 3×10¹², 4×10¹², 4.1×10¹², 4.2×10¹², 4.3×10¹², 4.4×10¹², 4.5×10¹², 4.6×10¹², 4.7×10¹², 4.8×10¹², 4.9×10¹², 5×10¹², 6×10¹², 7×10¹², 8×10¹², 8.1×10¹², 8.2×10¹², 8.3×10¹², 8.4×10¹², 8.5×10¹², 8.6×10¹², 8.7×10¹², 8.8×10¹², 8.9×10¹², 9×10¹², 1×10¹³, 2×10¹³, 3×10¹³, 4×10¹³, 5×10¹³, 6×10¹³, 7×10¹³, 8×10¹³, 9×10¹³, 1×10¹⁴, 2×10¹⁴, 3×10¹⁴, 4×10¹⁴, 5×10¹⁴, 6×10¹⁴, 7×10¹⁴, 8×10¹⁴, 9×10¹⁴, 1×10¹⁵, 2×10¹⁵, 3×10¹⁵, 4×10¹⁵, 5×10¹⁵, 6×10¹⁵, 7×10¹⁵, 8×10¹⁵, 9×10¹⁵, or 1×10¹⁶ VG/subject. In some embodiments, the concentration of the viral vector in the composition is 2.3×10¹¹ VG/subject. In some embodiments, the concentration of the viral vector in the composition is 7.2×10¹¹ VG/subject. In some embodiments, the concentration of the viral vector in the composition is 7.5×10¹¹ VG/subject. In some embodiments, the concentration of the viral vector in the composition is 1.4×10¹² VG/subject. In some embodiments, the concentration of the viral vector in the composition is 4.8×10¹² VG/subject. In some embodiments, the concentration of the viral vector in the composition is 8.8×10¹² VG/subject. In some embodiments, the concentration of the viral vector in the composition is 2.3×10¹² VG/subject. In some embodiments, the concentration of the viral vector in the composition is 2×10¹⁰ VG/subject. In some embodiments, the concentration of the viral vector in the composition is 1.6×10¹¹ VG/subject. In some embodiments, the concentration of the viral vector in the composition is 4.6×10¹¹ VG/subject.

[1203] In some embodiments, delivery of AAV particles to cells of the central nervous system (e.g., parenchyma) may comprise a total dose between about 1×10⁶ VG and about 1×10¹⁶ VG. In some embodiments, delivery may comprise a total dose of about 1×10⁶, 2×10⁶, 3×10⁶, 4×10⁶, 5×10⁶, 6×10⁶, 7×10⁶, 8×10⁶, 9×10⁶, 1×10⁷, 2×10⁷, 3×10⁷, 4×10⁷, 5×10⁷, 6×10⁷, 7×10⁷, 8×10⁷, 9×10⁷, 1×10⁸, 2×10⁸, 3×10⁸, 4×10⁸, 6×10⁸, 6×10⁸, 7×10⁸, 8×10⁸, 9×10⁸, 1×10⁹, 2×10⁹, 3×10⁹, 4×10⁹, 5×10⁹, 6×10⁹, 7×10⁹, 8×10⁹, 9×10⁹, 1×10¹⁰, 1.9×10¹⁰, 2×10¹⁰, 3×10¹⁰, 3.73×10¹⁰, 4×10¹⁰, 5×10¹⁰, 6×10¹⁰, 7×10¹⁰, 8×10¹⁰, 9×10¹⁰, 1×10¹¹, 2×10¹¹, 2.5×10¹¹, 3×10¹¹, 4×10¹¹, 5×10¹¹, 6×10¹¹, 7×10¹¹, 8×10¹¹, 9×10¹¹, 1×10¹², 2×10¹², 3×10¹², 4×10¹², 5×10¹², 6×10¹², 7×10¹², 8×10¹², 9×10¹², 1×10¹³, 2×10¹³, 3×10¹³, 4×10¹³, 5×10¹³, 6×10¹³, 7×10¹³, 8×10¹³, 9×10¹³, 1×10¹⁴, 2×10¹⁴, 3×10¹⁴, 4×10¹⁴, 5×10¹⁴, 6×10¹⁴, 7×10¹⁴, 8×10¹⁴, 9×10¹⁴, 1×10¹⁵, 2×10¹⁵, 3×10¹⁵, 4×10¹⁵, 5×10¹⁵, 6×10¹⁵, 7×10¹⁵, 8×10¹⁵, 9×10¹⁵, or 1×10¹⁶ VG. In some embodiments, the total dose is 1×10¹³ VG. In some embodiments, the total dose is 3×10¹³ VG. In some embodiments, the total dose is 3.73×10¹⁰ VG. In some embodiments, the total dose is 1.9×10¹⁰ VG. In some embodiments, the total dose is 2.5×10¹¹ VG. In some embodiments, the total dose is 5×10¹¹ VG. In some embodiments, the total dose is 1×10¹² VG. In some embodiments, the total dose is 5×10¹² VG.

### Combinations

[1204] The AAV particles may be used in combination with one or more other therapeutic, prophylactic, diagnostic, or imaging agents. The phrase “in combination with,” is not intended to require that the agents must be administered at the same time and/or formulated for delivery together, although these methods of delivery are within the scope of the present disclosure. Compositions can be administered concurrently with, prior to, or subsequent to, one or more other desired therapeutics or medical procedures. In general, each agent will be administered at a dose and/or on a time schedule determined for that agent. In some embodiments, the present disclosure encompasses the delivery of pharmaceutical, prophylactic, diagnostic, or imaging compositions in combination with agents that may improve their bioavailability, reduce and/or modify their metabolism, and/or modify their distribution within the body.

[1205] The therapeutic agents may be approved by the US Food and Drug Administration or may be in clinical trial or at the preclinical research stage. The therapeutic agents may utilize any therapeutic modality known in the art, with non-limiting examples including gene silencing or interference (i.e., miRNA, siRNA, RNAi, shRNA), gene editing (i.e., TALEN, CRISPR/Cas9 systems, zinc finger nucleases), and gene, protein or enzyme replacement.

### Measurement of Expression

[1206] Expression of GCase protein from viral genomes may be determined using various methods known in the art such as, but not limited to immunochemistry (e.g., IHC), enzyme-linked immunosorbent assay (ELISA), affinity ELISA, ELISPOT, flow cytometry, immunocytology, surface plasmon resonance analysis, kinetic exclusion assay, liquid chromatography-mass spectrometry (LCMS), high-performance liquid chromatography (HPLC), BCA assay, immunoelectrophoresis, Western blot, SDS-PAGE, protein immunoprecipitation, PCR, and/or in situ hybridization (ISH). In some embodiments, transgenes encoding GCase protein delivered in different AAV capsids may have different expression levels in different CNS tissues. In certain embodiments, the GCase protein is detectable by Western blot.

[1207] Alternatively methods of detecting GBA expression are known, including, for example, use of the methods and compounds as described in Int'l Pub. No. WO2019136484, incorporated herein by reference in its entirety.

### VII. Kits and Devices

### Kits

[1208] In some aspects, the present disclosure provides a variety of kits for conveniently and/or effectively carrying out methods of the present disclosure. Typically, kits will comprise sufficient amounts and/or numbers of components to allow a user to perform multiple treatments of a subject(s) and/or to perform multiple experiments.

[1209] Any of the vectors, constructs, or GCase proteins of the present disclosure may be comprised in a kit. In some embodiments, kits may further include reagents and/or instructions for creating and/or synthesizing compounds and/or compositions of the present disclosure. In some embodiments, kits may also include one or more buffers. In some embodiments, kits of the disclosure may include components for making protein or nucleic acid arrays or libraries and thus, may include, for example, solid supports.

[1210] In some embodiments, kit components may be packaged either in aqueous media or in lyophilized form. The container means of the kits will generally include at least one vial, test tube, flask, bottle, syringe or other container means, into which a component may be placed, and suitably aliquoted. Where there is more than one kit component, (labeling reagent and label may be packaged together), kits may also generally contain second, third or other additional containers into which additional components may be separately placed. In some embodiments, kits may also comprise second container means for containing sterile, pharmaceutically acceptable buffers and/or other diluents. In some embodiments, various combinations of components may be comprised in one or more vial. Kits of the present disclosure may also typically include means for containing compounds and/or compositions of the present disclosure, e.g., proteins, nucleic acids, and any other reagent containers in close confinement for commercial sale. Such containers may include injection or blow-molded plastic containers into which desired vials are retained.

[1211] In some embodiments, kit components are provided in one and/or more liquid solutions. In some embodiments, liquid solutions are aqueous solutions, with sterile aqueous solutions being particularly used. In some embodiments, kit components may be provided as dried powder(s). When reagents and/or components are provided as dry powders, such powders may be reconstituted by the addition of suitable volumes of solvent. In some embodiments, it is envisioned that solvents may also be provided in another container means. In some embodiments, labeling dyes are provided as dried powders. In some embodiments, it is contemplated that 10, 20, 30, 40, 50, 60, 70, 80, 90, 100, 120, 120, 130, 140, 150, 160, 170, 180, 190, 200, 300, 400, 500, 600, 700, 800, 900, 1000 micrograms or at least or at most those amounts of dried dye are provided in kits of the disclosure. In such embodiments, dye may then be resuspended in any suitable solvent, such as DMSO.

[1212] In some embodiments, kits may include instructions for employing kit components as well the use of any other reagent not included in the kit. Instructions may include variations that may be implemented.

### Devices

[1213] In some embodiments, compounds and/or compositions of the present disclosure may be combined with, coated onto or embedded in a device. Devices may include, but are not limited to, dental implants, stents, bone replacements, artificial joints, valves, pacemakers and/or other implantable therapeutic device.

[1214] The present disclosure provides for devices which may incorporate viral vectors that encode one or more GCase protein molecules. These devices contain in a stable formulation the viral vectors which may be immediately delivered to a subject in need thereof, such as a human patient.

[1215] Devices for administration may be employed to deliver the viral vectors encoding GCase protein of the present disclosure according to single, multi- or split-dosing regimens taught herein.

[1216] Method and devices known in the art for multi-administration to cells, organs and tissues are contemplated for use in conjunction with the methods and compositions disclosed herein as embodiments of the present disclosure.

### VIII. Definitions

[1217] At various places in the present specification, substituents of compounds of the present disclosure are disclosed in groups or in ranges. It is specifically intended that the present disclosure include each and every individual sub-combination of the members of such groups and ranges. The following is a non-limiting list of term definitions.

[1218] Adeno-associated virus: As used herein, the term “adeno-associated virus” or “AAV” refers to members of the dependovirus genus or a variant, e.g., a functional variant, thereof. In some embodiments, the AAV is wild type, or naturally occurring. In some embodiments, the AAV is recombinant.

[1219] AAV Particle: As used herein, an “AAV particle” refers to a particle or a virion comprising an AAV capsid, e.g., an AAV capsid variant, and a polynucleotide, e.g., a viral genome or a vector genome. In some embodiments, the viral genome of the AAV particle comprises at least one payload region and at least one ITR. In some embodiments, an AAV particle of the disclosure is an AAV particle comprising an AAV capsid polypeptide, e.g., a parent capsid sequence with at least one peptide insert. In some embodiments, the AAV particle is capable of delivering a nucleic acid, e.g., a payload region, encoding a payload to cells, typically, mammalian, e.g., human, cells. In some embodiments, an AAV particle of the present disclosure may be produced recombinantly. In some embodiments, an AAV particle may be derived from any serotype, described herein or known in the art, including combinations of serotypes (e.g., “pseudotyped” AAV) or from various genomes (e.g., single stranded or self-complementary). In some embodiments, the AAV particle may be replication defective and/or targeted. In some embodiments, the AAV particle may comprises a peptide present, e.g., inserted into, the capsid to enhance tropism for a desired target tissue. It is to be understood that reference to the AAV particle of the disclosure also includes pharmaceutical compositions thereof, even if not explicitly recited.

[1220] Administered in combination: As used herein, the term “administered in combination” or “delivered in combination” or “combined administration” refers to exposure of two or more agents (e.g., AAV) administered at the same time or within an interval such that the subject is at some point in time exposed to both agents and/or such that there is an overlap in the effect of each agent on the patient. In some embodiments, at least one dose of one or more agents is administered within about 24 hours, 12 hours, 6 hours, 3 hours, 1 hour, 30 minutes, 15 minutes, 10 minutes, 5 minutes, or 1 minute of at least one dose of one or more other agents. In some embodiments, administration occurs in overlapping dosage regimens. As used herein, the term “dosage regimen” refers to a plurality of doses spaced apart in time. Such doses may occur at regular intervals or may include one or more hiatuses in administration. In some embodiments, the administration of individual doses of one or more compounds and/or compositions of the present disclosure, as described herein, are spaced sufficiently closely together such that a combinatorial (e.g., a synergistic) effect is achieved.

[1221] Amelioration: As used herein, the term “amelioration” or “ameliorating” refers to a lessening of severity of at least one indicator of a condition or disease. For example, in the context of a neurodegenerative disorder, amelioration includes the reduction or stabilization of neuron loss.

[1222] Approximately: As used herein, the term “approximately” or “about,” as applied to one or more values of interest, refers to a value that is similar to a stated reference value. In certain embodiments, the term “approximately” or “about” refers to a range of values that fall within 25%, 20%, 19%, 18%, 17%, 16%, 15%, 14%, 13%, 12%, 11%, 10%, 9%, 8%, 7%, 6%, 5%, 4%, 3%, 2%, 1%, 0.5%, 0.25%, 0.1%, or less in either direction (greater than or less than) of the stated reference value unless otherwise stated or otherwise evident from the context (except where such number would exceed 100% of a possible value).

[1223] Capsid: As used herein, the term “capsid” refers to the exterior, e.g., a protein shell, of a virus particle, e.g., an AAV particle, that is substantially (e.g., >50%, >60%, >70%, >80%, >90%, >95%, >99%, or 100%) protein. In some embodiments, the capsid is an AAV capsid comprising an AAV capsid protein described herein, e.g., a VP1, VP2, and/or VP3 polypeptide. The AAV capsid protein can be a wild-type AAV capsid protein or a variant, e.g., a structural and/or functional variant from a wild-type or a reference capsid protein, referred to herein as an “AAV capsid variant.” In some embodiments, the AAV capsid variant described herein has the ability to enclose, e.g., encapsulate, a viral genome and/or is capable of entry into a cell, e.g., a mammalian cell. In some embodiments, the AAV capsid variant described herein may have modified tropism compared to that of a wild-type AAV capsid, e.g., the corresponding wild-type capsid.

[1224] Encapsulate: As used herein, the term “encapsulate” means to enclose, surround or encase. As an example, a capsid protein, e.g., an AAV capsid variant, often encapsulates a viral genome. In some embodiments, encapsulate within a capsid, e.g., an AAV capsid variant, encompasses 100% coverage by a capsid, as well as less than 100% coverage, e.g., 95%, 90%, 85%, 80%, 70%, 60% or less. For example, gaps or discontinuities may be present in the capsid so long as the viral genome is retained in the capsid, e.g., prior to entry into a cell.

[1225] Central Nervous System or CNS: As used herein, “central nervous system” or “CNS” refers to one of the two major subdivisions of the nervous system, which in vertebrates includes the brain and spinal cord. The central nervous system coordinates the activity of the entire nervous system.

[1226] Cervical Region: As used herein, “cervical region” refers to the region of the spinal cord comprising the cervical vertebrae C1, C2, C3, C4, C5, C6, C7, and C8.

[1227] CNS tissue: As used herein, “CNS tissue” or “CNS tissues” refers to the tissues of the central nervous system, which in vertebrates, include the brain and spinal cord and sub-structures thereof.

[1228] CNS structures: As used herein, “CNS structures” refers to structures of the central nervous system and sub-structures thereof. Non-limiting examples of structures in the spinal cord may include, ventral horn, dorsal horn, white matter, and nervous system pathways or nuclei within. Non-limiting examples of structures in the brain include, forebrain, midbrain, hindbrain, diencephalon, telencephalon, myelencephalon, metencephalon, mesencephalon, prosencephalon, rhombencephalon, cortices, frontal lobe, parietal lobe, temporal lobe, occipital lobe, cerebrum, thalamus, hypothalamus, tectum, tegmentum, cerebellum, pons, medulla, amygdala, hippocampus, basal ganglia, corpus callosum, pituitary gland, putamen, striatum, ventricles and sub-structures thereof.

[1229] CNS Cells: As used herein, “CNS cells” refers to cells of the central nervous system and sub-structures thereof. Non-limiting examples of CNS cells include, neurons and sub-types thereof, glia, microglia, oligodendrocytes, ependymal cells and astrocytes. Non-limiting examples of neurons include sensory neurons, motor neurons, interneurons, unipolar cells, bipolar cells, multipolar cells, pseudounipolar cells, pyramidal cells, basket cells, stellate cells, Purkinje cells, Betz cells, amacrine cells, granule cell, ovoid cell, medium aspiny neurons and large aspiny neurons.

[1230] Codon optimization: As used herein, the term “codon optimization” refers to a process of changing codons of a given gene in such a manner that the polypeptide sequence encoded by the gene remains the same while the changed codons improve the process of expression of the polypeptide sequence. For example, if the polypeptide is of a human protein sequence and expressed in E. coli, expression will often be improved if codon optimization is performed on the DNA sequence to change the human codons to codons that are more effective for expression in E. coli.

[1231] Conservative amino acid substitution: As used herein, a “conservative amino acid substitution” is one in which the amino acid residue is replaced with an amino acid residue having a similar side chain. Families of amino acid residues having similar side chains have been defined in the art. These families include amino acids with basic side chains (e.g., lysine, arginine, histidine), acidic side chains (e.g., aspartic acid, glutamic acid), uncharged polar side chains (e.g., glycine, asparagine, glutamine, serine, threonine, tyrosine, cysteine), nonpolar side chains (e.g., alanine, valine, leucine, isoleucine, proline, phenylalanine, methionine, tryptophan), beta-branched side chains (e.g., threonine, valine, isoleucine) and aromatic side chains (e.g., tyrosine, phenylalanine, tryptophan, histidine).

[1232] Conserved: As used herein, the term “conserved” refers to nucleotides or amino acid residues of polynucleotide or polypeptide sequences, respectively, that are those that occur unaltered in the same position of two or more sequences being compared. Nucleotides or amino acids that are relatively conserved are those that are conserved among more related sequences than nucleotides or amino acids appearing elsewhere in the sequences.

[1233] In some embodiments, two or more sequences are said to be “completely conserved” if they are 100% identical to one another. In some embodiments, two or more sequences are said to be “highly conserved” if they are at least 70% identical, at least 80% identical, at least 90% identical, or at least 95% identical to one another. In some embodiments, two or more sequences are said to be “highly conserved” if they are about 70% identical, about 80% identical, about 90% identical, about 95%, about 98%, or about 99% identical to one another. In some embodiments, two or more sequences are said to be “conserved” if they are at least 30% identical, at least 40% identical, at least 50% identical, at least 60% identical, at least 70% identical, at least 80% identical, at least 90% identical, or at least 95% identical to one another. In some embodiments, two or more sequences are said to be “conserved” if they are about 30% identical, about 40% identical, about 50% identical, about 60% identical, about 70% identical, about 80% identical, about 90% identical, about 95% identical, about 98% identical, or about 99% identical to one another. Conservation of sequence may apply to the entire length of an oligonucleotide or polypeptide or may apply to a portion, region or feature thereof.

[1234] In some embodiments, conserved sequences are not contiguous. Those skilled in the art are able to appreciate how to achieve alignment when gaps in contiguous alignment are present between sequences, and to align corresponding residues not withstanding insertions or deletions present.

[1235] Delivery: As used herein, “delivery” refers to the act or manner of delivering a parvovirus e.g., AAV compound, substance, entity, moiety, cargo or payload to a target. Such target may be a cell, tissue, organ, organism, or system (whether biological or production).

[1236] Delivery Agent: As used herein, “delivery agent” refers to any agent which facilitates, at least in part, the delivery of one or more substances (including, but not limited to a compounds and/or compositions of the present disclosure, e.g., viral particles or AAV vectors) to targeted cells.

[1237] Delivery route: As used herein, the term “delivery route” and the synonymous term “administration route” refers to any of the different methods for providing a therapeutic agent to a subject. Routes of administration are generally classified by the location at which the substance is applied and may also be classified based on where the target of action is. Examples include, but are not limited to: intravenous administration, subcutaneous administration, oral administration, parenteral administration, enteral administration, topical administration, sublingual administration, inhalation administration, and injection administration, or other routes of administration described herein.

[1238] Effective amount: As used herein, the term “effective amount” of an agent is that amount sufficient to effect beneficial or desired results, for example, upon single or multiple dose administration to a subject or a cell, in curing, alleviating, relieving or improving one or more symptoms of a disorder and, as such, an “effective amount” depends upon the context in which it is being applied. For example, in the context of administering an agent that treats Parkinson Disease (PD) and related disorders, including Gaucher Disease, and Dementia with Lewy Bodies (collectively, “GBA-related disorders”), an effective amount of an agent is, for example, an amount sufficient to achieve treatment, as defined herein, of a GBA-related disorder as compared to the response obtained without administration of the agent.

[1239] Expression: As used herein, “expression” of a nucleic acid sequence refers to one or more of the following events: (1) production of an RNA template from a DNA sequence (e.g., by transcription); (2) processing of an RNA transcript (e.g., by splicing, editing, 5′ cap formation, and/or 3′ end processing); (3) translation of an RNA into a polypeptide or protein; (4) folding of a polypeptide or protein; and/or (5) post-translational modification of a polypeptide or protein.

[1240] Excipient: As used herein, the term “excipient” refers to an inactive substance that serves as the vehicle or medium for an active pharmaceutical agent or other active substance.

[1241] Formulation: As used herein, a “formulation” includes at least a compound and/or composition of the present disclosure (e.g., a vector, AAV particle, etc.) and a delivery agent.

[1242] Fragment: A “fragment,” as used herein, refers to a contiguous portion of a whole. For example, fragments of proteins may comprise polypeptides obtained by digesting full-length protein isolated from cultured cells. In some embodiments, a fragment of a protein includes at least 3, 4, 5, 6, 7, 8, 9, 10, 11, 12, 13, 14, 15, 16, 17, 18, 19, 20, 25, 30, 35, 40, 45, 50, 55, 60, 65, 70, 75, 80, 85, 90, 95, 100, 150, 200, 250 or more amino acids. A fragment may also refer to a truncation (e.g., an N-terminal and/or C-terminal truncation) of a protein or a truncation (e.g., at the 5′ and/or 3′ end) of a nucleic acid. A protein fragment may be obtained by expression of a truncated nucleic acid, such that the nucleic acid encodes a portion of the fill-length protein.

[1243] GBA-related disorder: The terms “GBA-related disorder,” “GBA-related disease,” “GBA patient,” and the like refer to diseases or disorders having a deficiency in the GBA gene, such as a heritable, e.g., autosomal recessive, mutation in GBA resulting in deficient or defective GCase protein expression in patient cells. GBA-related disorders expressly include, but are not limited to Parkinson disease (PD), Gaucher disease, and Dementia with Lewy Bodies; and may include additional Lewy body disorders, lysosomal storage disorders, and related disorders. GBA patients are individuals harboring one or more mutation in the GBA gene, including, e.g., biallelic mutations, making them more susceptible to GBA-related disorders.

[1244] GCase protein: As used herein, the terms “GCase”, “GCase protein,” “GCase proteins,” and the like refer to protein products or portions of protein products including peptides of the GBA gene (Ensemble gene ID: ENSG00000177628), homologs or variants thereof, and orthologs thereof, including non-human proteins and homologs thereof. GCase proteins include fragments, derivatives, and modifications of GBA gene products.

[1245] Homology: As used herein, the term “homology” refers to the overall relatedness between polymeric molecules, e.g. between nucleic acid molecules (e.g. DNA molecules and/or RNA molecules) and/or between polypeptide molecules. In some embodiments, polymeric molecules are considered to be “homologous” to one another if their sequences are at least 25%, 30%, 35%, 40%, 45%, 50%, 55%, 60%, 65%, 70%, 75%, 80%, 85%, 90%, 95%, or 99% identical or similar. The term “homologous” necessarily refers to a comparison between at least two sequences (polynucleotide or polypeptide sequences). In accordance with the disclosure, two polynucleotide sequences are considered to be homologous if the polypeptides they encode are at least about 50%, 60%, 70%, 80%, 90%, 95%, or even 99% identical for at least one stretch of at least about 20 amino acids. In some embodiments, homologous polynucleotide sequences are characterized by the ability to encode a stretch of at least 4-5 uniquely specified amino acids. For polynucleotide sequences less than 60 nucleotides in length, homology is typically determined by the ability to encode a stretch of at least 4-5 uniquely specified amino acids. In accordance with the disclosure, two protein sequences are considered to be homologous if the proteins are at least about 50%, 60%, 70%, 80%, or 90% identical for at least one stretch of at least about 20 amino acids. In many embodiments, homologous protein may show a large overall degree of homology and a high degree of homology over at least one short stretch of at least 3, 4, 5, 6, 7, 8, 9, 10, 11, 12, 13, 14, 15, 16, 17, 18, 19, 20, 25, 30, 35, 40, 45, 50, or more amino acids. In many embodiments, homologous proteins share one or more characteristic sequence elements. As used herein, the term “characteristic sequence element” refers to a motif present in related proteins. In some embodiments, the presence of such motifs correlates with a particular activity (such as biological activity).

[1246] Humanized: As used herein, the term “humanized” refers to a non-human sequence of a polynucleotide or a polypeptide which has been altered to increase its similarity to a corresponding human sequence.

[1247] Identity: As used herein, the term “identity” refers to the overall relatedness between polymeric molecules, e.g., between oligonucleotide molecules (e.g. DNA molecules and/or RNA molecules) and/or between polypeptide molecules. Calculation of the percent identity of two polynucleotide sequences, for example, may be performed by aligning the two sequences for optimal comparison purposes (e.g., gaps can be introduced in one or both of a first and a second nucleic acid sequences for optimal alignment and non-identical sequences can be disregarded for comparison purposes). In certain embodiments, the length of a sequence aligned for comparison purposes is at least 30%, at least 40%, at least 50%, at least 60%, at least 70%, at least 80%, at least 90%, at least 95%, or 100% of the length of the reference sequence. The nucleotides at corresponding nucleotide positions are then compared. When a position in the first sequence is occupied by the same nucleotide as the corresponding position in the second sequence, then the molecules are identical at that position. The percent identity between the two sequences is a function of the number of identical positions shared by the sequences, taking into account the number of gaps, and the length of each gap, which needs to be introduced for optimal alignment of the two sequences. The comparison of sequences and determination of percent identity between two sequences can be accomplished using a mathematical algorithm. For example, the percent identity between two nucleotide sequences can be determined using methods such as those described in Computational Molecular Biology, Lesk, A. M., ed., Oxford University Press, New York, 1988; Biocomputing: Informatics and Genome Projects, Smith, D. W., ed., Academic Press, New York, 1993; Sequence Analysis in Molecular Biology, von Heinje, G., Academic Press, 1987; Computer Analysis of Sequence Data, Part I, Griffin, A. M., and Griffin, H. G., eds., Humana Press, New Jersey, 1994; and Sequence Analysis Primer, Gribskov, M. and Devereux, J., eds., M Stockton Press, New York, 1991; each of which is incorporated herein by reference in its entirety. For example, the percent identity between two nucleotide sequences can be determined, for example using the algorithm of Meyers and Miller (CABIOS, 1989, 4:11-17), which has been incorporated into the ALIGN program (version 2.0) using a PAM120 weight residue table, a gap length penalty of 12 and a gap penalty of 4. The percent identity between two nucleotide sequences can, alternatively, be determined using the GAP program in the GCG software package using an NWSgapdna.CMP matrix. Methods commonly employed to determine percent identity between sequences include, but are not limited to those disclosed in Carillo, H., and Lipman, D., SIAM J Applied Math., 48:1073 (1988); incorporated herein by reference in its entirety. Techniques for determining identity are codified in publicly available computer programs. Computer software to determine homology between two sequences include, but are not limited to, GCG program package, Devereux, J., et al., Nucleic Acids Research, 12(1), 387 (1984)), BLASTP, BLASTN, and FASTA Altschul, S. F. et al., J. Molecular Biol., 215, 403 (1990)).

[1248] Isolated: As used herein, the term “isolated” refers to a substance or entity that is altered or removed from the natural state, e.g., altered or removed from at least some of component with which it is associated in the natural state. For example, a nucleic acid or a peptide naturally present in a living animal is not “isolated,” but the same nucleic acid or peptide partially or completely separated from the coexisting materials of its natural state is “isolated.” An isolated nucleic acid or protein can exist in substantially purified form, or can exist in a non-native environment such as, for example, a host cell. Such polynucleotides could be part of a vector and/or such polynucleotides or polypeptides could be part of a composition, and still be isolated in that such vector or composition is not part of the environment in which it is found in nature. In some embodiments, an isolated nucleic acid is recombinant, e.g., incorporated into a vector.

[1249] Lumbar Region: As used herein, the term “lumbar region” refers to the region of the spinal cord comprising the lumbar vertebrae L1, L2, L3, L4, and LS.

[1250] miR binding site series: As used herein, the “miR binding site series” or the “miR binding site” includes an RNA sequence on the RNA transcript produced by transcribing the AAV vector genome. The “miR binding site series” or the “miR binding site” also includes the DNA sequence corresponding to the RNA sequence, in that they differ only by the T in DNA and the U in RNA. The reverse complement of such DNA is the coding sequence for the RNA sequence. That is, in some embodiments, in an expression cassette containing a DNA positive strand, the miR binding site sequence is the reverse complement of the miRNA to which it binds.

[1251] Modified: As used herein, the term “modified” refers to a changed state or structure of a molecule or entity as compared with a parent or reference molecule or entity. Molecules may be modified in many ways including chemically, structurally, and functionally. In some embodiments, compounds and/or compositions of the present disclosure are modified by the introduction of non-natural amino acids, or non-natural nucleotides.

[1252] Mutation: As used herein, the term “mutation” refers to a change and/or alteration. In some embodiments, mutations may be changes and/or alterations to proteins (including peptides and polypeptides) and/or nucleic acids (including polynucleic acids). In some embodiments, mutations comprise changes and/or alterations to a protein and/or nucleic acid sequence. Such changes and/or alterations may comprise the addition, substitution and or deletion of one or more amino acids (in the case of proteins and/or peptides) and/or nucleotides (in the case of nucleic acids and or polynucleic acids). In embodiments wherein mutations comprise the addition and/or substitution of amino acids and/or nucleotides, such additions and/or substitutions may comprise 1 or more amino acid and/or nucleotide residues and may include modified amino acids and/or nucleotides. One or more mutations may result in a “mutant,” “derivative,” or “variant,” e.g., of a nucleic acid sequence or polypeptide or protein sequence.

[1253] Variant: The term “variant” refers to a polypeptide or polynucleotide that has an amino acid or a nucleotide sequence that is substantially identical, e.g., having at least 70%, 75%, 80%, 85%, 90%, 95% or 99% sequence identity to a reference sequence. In some embodiments, the variant is a functional variant.

[1254] Functional Variant: The term “functional variant” refers to a polypeptide variant or a polynucleotide variant that has at least one activity of the reference sequence.

[1255] Insertional Variant: “Insertional variants” when referring to polypeptides are those with one or more amino acids inserted, e.g., immediately adjacent or subsequent, to a position in an amino acid sequence. “Immediately adjacent” or “immediately subsequent” to an amino acid means connected to either the alpha-carboxy or alpha-amino functional group of the amino acid.

[1256] Nucleic acid: As used herein, the terms “nucleic acid,” “polynucleotide,” and “oligonucleotide” refer to any nucleic acid polymers composed of either polydeoxyribonucleotides (containing 2-deoxy-D-ribose), or polyribonucleotides (containing D-ribose), or any other type of polynucleotide that is an N glycoside of a purine or pyrimidine base, or modified purine or pyrimidine bases. There is no intended distinction in length between the term “nucleic acid,” “polynucleotide,” and “oligonucleotide,” and these terms will be used interchangeably. These terms refer only to the primary structure of the molecule. Thus, these terms include double- and single-stranded DNA, as well as double- and single-stranded RNA.

[1257] Operably linked: As used herein, the phrase “operably linked” refers to a functional connection between two or more molecules, constructs, transcripts, entities, moieties or the like.

[1258] Particle: As used herein, a “particle” is a virus comprised of at least two components, a protein capsid and a polynucleotide sequence enclosed within the capsid.

[1259] Payload: As used herein, “payload” or “payload region” refers to one or more polynucleotides or polynucleotide regions encoded by or within a viral genome or an expression product of such polynucleotide or polynucleotide region, e.g., a transgene, a polynucleotide encoding a polypeptide.

[1260] Payload construct: As used herein, “payload construct” is one or more polynucleotide regions encoding or comprising a payload that is flanked on one or both sides by an inverted terminal repeat (ITR) sequence. The payload construct is a template that is replicated in a viral production cell to produce a viral genome.

[1261] Payload construct vector: As used herein, “payload construct vector” is a vector encoding or comprising a payload construct, and regulatory regions for replication and expression in bacterial cells. The payload construct vector may also comprise a component for viral expression in a viral replication cell.

[1262] Pharmaceutically acceptable: The phrase “pharmaceutically acceptable” is employed herein to refer to those compounds, materials, compositions, and/or dosage forms which are suitable for use in contact with the tissues of human beings and animals.

[1263] Pharmaceutically acceptable excipients: As used herein, the term “pharmaceutically acceptable excipient,” as used herein, refers to any ingredient other than active agents (e.g., as described herein) present in pharmaceutical compositions t that can function as vehicles for suspending and/or dissolving active agents.

[1264] Pharmaceutically acceptable salts: Pharmaceutically acceptable salts of the compounds described herein are forms of the disclosed compounds wherein the acid or base moiety is in its salt form (e.g., as generated by reacting a free base group with a suitable organic acid). Examples of pharmaceutically acceptable salts include, but are not limited to, mineral or organic acid salts of basic residues such as amines; alkali or organic salts of acidic residues such as carboxylic acids; and the like. Lists of suitable salts are found in Remington's Pharmaceutical Sciences, 17^{th} ed., Mack Publishing Company, Easton, Pa., 1985, p. 1418, Pharmaceutical Salts: Properties, Selection, and Use, P. H. Stahl and C. G. Wermuth (eds.), Wiley-VCH, 2008, and Berge et al., Journal of Pharmaceutical Science, 66, 1-19 (1977), the contents of each of which are incorporated herein by reference in their entirety.

[1265] Pharmaceutical Composition: As used herein, the term “pharmaceutical composition” or pharmaceutically acceptable composition” comprises AAV polynucleotides, AAV genomes, or AAV particle and one or more pharmaceutically acceptable excipients, solvents, adjuvants, and/or the like.

[1266] Polypeptide: As used herein, “polypeptide” means a polymer of amino acid residues (natural or unnatural) linked together most often by peptide bonds. The term, as used herein, refers to proteins, polypeptides, and peptides of any size, structure, or function. In some instances, the polypeptide encoded is smaller than about 50 amino acids and the polypeptide is then termed a peptide. If the polypeptide is a peptide, it will be at least about 2, 3, 4, or at least 5 amino acid residues long. Thus, polypeptides include gene products, naturally occurring polypeptides, synthetic polypeptides, homologs, orthologs, paralogs, fragments and other equivalents, variants, and analogs of the foregoing. A polypeptide may be a single molecule or may be a multi-molecular complex such as a dimer, trimer or tetramer. They may also comprise single chain or multichain polypeptides and may be associated or linked. The term polypeptide may also apply to amino acid polymers in which one or more amino acid residues are an artificial chemical analogue of a corresponding naturally occurring amino acid.

[1267] Polypeptide variant: The term “polypeptide variant” refers to molecules which differ in their amino acid sequence from a native or reference sequence. The amino acid sequence variants may possess substitutions, deletions, and/or insertions at certain positions within the amino acid sequence, as compared to a native or reference sequence. In some embodiments, a variant comprises a sequence having at least about 50%, at least about 80%, or at least about 90%, identical (homologous) to a native or a reference sequence.

[1268] Peptide: As used herein, “peptide” is less than or equal to 50 amino acids long, e.g., about 5, 10, 15, 20, 25, 30, 35, 40, 45, or 50 amino acids long.

[1269] Preventing: As used herein, the term “preventing” refers to partially or completely delaying onset of an infection, disease, disorder and/or condition; partially or completely delaying onset of one or more symptoms, features, or clinical manifestations of a particular infection, disease, disorder, and/or condition; partially or completely delaying onset of one or more symptoms, features, or manifestations of a particular infection, disease, disorder, and/or condition; partially or completely delaying progression from an infection, a particular disease, disorder and/or condition; and/or decreasing the risk of developing pathology associated with the infection, the disease, disorder, and/or condition.

[1270] Promoter: As used herein, the term “promoter” refers to a nucleic acid site to which a polymerase enzyme will bind to initiate transcription (DNA to RNA) or reverse transcription (RNA to DNA).

[1271] Punfied: As used herein, the term “purify” means to make substantially pure or clear from one or more unwanted components, material defilement, admixture or imperfection. “Purified” refers to the state of being pure. “Purification” refers to the process of making pure. As used herein, a substance is “pure” if it is substantially free of (substantially isolated from) one or more components, e.g., one or more components found in a native context.

[1272] Region: As used herein, the term “region” refers to a zone or general area. In some embodiments, when referring to a protein or protein module, a region may comprise a linear sequence of amino acids along the protein or protein module or may comprise a three dimensional area, an epitope and/or a cluster of epitopes. In some embodiments, regions comprise terminal regions. As used herein, the term “terminal region” refers to regions located at the ends or termini of a given agent. When referring to proteins, terminal regions may comprise N- and/or C-termini. N-termini refer to the end of a protein comprising an amino acid with a free amino group. C-termini refer to the end of a protein comprising an amino acid with a free carboxyl group. N- and/or C-terminal regions may comprise the N- and/or C-termini as well as surrounding amino acids. In some embodiments, N- and/or C-terminal regions comprise from about 3 amino acids to about 30 amino acids, from about 5 amino acids to about 40 amino acids, from about 10 amino acids to about 50 amino acids, from about 20 amino acids to about 100 amino acids and/or at least 100 amino acids. In some embodiments, N-terminal regions may comprise any length of amino acids that includes the N-terminus, but does not include the C-terminus. In some embodiments, C-terminal regions may comprise any length of amino acids, which include the C-terminus, but do not comprise the N-terminus.

[1273] In some embodiments, when referring to a polynucleotide, a region may comprise a linear sequence of nucleic acids along the polynucleotide or may comprise a three dimensional area, secondary structure, or tertiary structure. In some embodiments, regions comprise terminal regions. As used herein, the term “terminal region” refers to regions located at the ends or termini of a given agent. When referring to polynucleotides, terminal regions may comprise 5′ and 3′ termini. 5′ termini refer to the end of a polynucleotide comprising a nucleic acid with a free phosphate group. 3′ termini refer to the end of a polynucleotide comprising a nucleic acid with a free hydroxyl group. 5′ and 3′ regions may there for comprise the 5′ and 3′ termini as well as surrounding nucleic acids. In some embodiments, 5′ and 3′ terminal regions comprise from about 9 nucleic acids to about 90 nucleic acids, from about 15 nucleic acids to about 120 nucleic acids, from about 30 nucleic acids to about 150 nucleic acids, from about 60 nucleic acids to about 300 nucleic acids and/or at least 300 nucleic acids. In some embodiments, 5′ regions may comprise any length of nucleic acids that includes the 5′ terminus, but does not include the 3′ terminus. In some embodiments, 3′ regions may comprise any length of nucleic acids, which include the 3′ terminus, but does not comprise the 5′ terminus.

[1274] RNA or RNA molecule: As used herein, the term “RNA” or “RNA molecule” or “ribonucleic acid molecule” refers to a polymer of ribonucleotides; the term “DNA” or “DNA molecule” or “deoxyribonucleic acid molecule” refers to a polymer of deoxyribonucleotides. DNA and RNA can be synthesized naturally, e.g., by DNA replication and transcription of DNA, respectively; or be chemically synthesized. DNA and RNA can be single-stranded (i.e., ssRNA or ssDNA, respectively) or multi-stranded (e.g., double stranded, i.e., dsRNA and dsDNA, respectively). The term “mRNA” or “messenger RNA”, as used herein, refers to a single stranded RNA that encodes the amino acid sequence of one or more polypeptide chains.

[1275] Sample: As used herein, the term “sample” refers to an aliquot or portion taken from a source and/or provided for analysis or processing. In some embodiments, a sample is from a biological source such as a tissue, cell or component part (e.g. a body fluid, including but not limited to blood, mucus, lymphatic fluid, synovial fluid, cerebrospinal fluid, saliva, amniotic fluid, amniotic cord blood, urine, vaginal fluid and semen).

[1276] Serotype: As used herein, the term “serotype” refers to distinct variations in a capsid of an AAV based on surface antigens which allow epidemiologic classifications of the AAVs at the sub-species level.

[1277] Signal Sequences: As used herein, the phrase “signal sequences” refers to a sequence which can direct the transport or localization.

[1278] Similarity: As used herein, the term “similarity” refers to the overall relatedness between polymeric molecules, e.g. between polynucleotide molecules (e.g. DNA molecules and/or RNA molecules) and/or between polypeptide molecules. Calculation of percent similarity of polymeric molecules to one another can be performed in the same manner as a calculation of percent identity, except that calculation of percent similarity takes into account conservative substitutions as is understood in the art.

[1279] Spacer: As used herein, a “spacer” is generally any selected nucleic acid sequence of, e.g., 1, 2, 3, 4, 5, 6, 7, 8, 9, or 10 nucleotides in length, which is located between two or more consecutive miR binding site sequences.

[1280] Subject: As used herein, the term “subject” or “patient” refers to any organism to which a composition in accordance with the disclosure may be administered, e.g., for experimental, diagnostic, prophylactic, and/or therapeutic purposes. Similarly, “subject” or “patient” refers to an organism who may seek, who may require, who is receiving, or who will receive treatment or who is under care by a trained professional for a particular disease or condition. Typical subjects include animals (e.g., mammals such as mice, rats, rabbits, non-human primates, and humans). In certain embodiments, a subject or patient may be susceptible to or suspected of having a GBA-related disorder. In certain embodiments, a subject or patient may be diagnosed with PD, Gaucher Disease, or Dementia with Lewy Bodies disease.

[1281] Substantially: As used herein, the term “substantially” refers to the qualitative condition of exhibiting total or near-total extent or degree of a characteristic or property of interest. One of ordinary skill in the biological arts will understand that biological and chemical phenomena rarely, if ever, go to completion and/or proceed to completeness or achieve or avoid an absolute result. The term “substantially” is therefore used herein to capture the potential lack of completeness inherent in many biological and chemical phenomena.

[1282] Suffering from: An individual who is “suffering from” a disease, disorder, and/or condition has been diagnosed with or displays one or more symptoms of a disease, disorder, and/or condition.

[1283] Susceptible to: An individual who is “susceptible to” a disease, disorder, and/or condition has not been diagnosed with and/or may not exhibit symptoms of the disease, disorder, and/or condition but harbors a propensity to develop a disease or its symptoms. In some embodiments, an individual who is susceptible to a disease, disorder, and/or condition (for example, cancer) may be characterized by one or more of the following: (1) a genetic mutation associated with development of the disease, disorder, and/or condition; (2) a genetic polymorphism associated with development of the disease, disorder, and/or condition; (3) increased and/or decreased expression and/or activity of a protein and/or nucleic acid associated with the disease, disorder, and/or condition; (4) habits and/or lifestyles associated with development of the disease, disorder, and/or condition; (5) a family history of the disease, disorder, and/or condition; and (6) exposure to and/or infection with a microbe associated with development of the disease, disorder, and/or condition. In some embodiments, an individual who is susceptible to a disease, disorder, and/or condition will develop the disease, disorder, and/or condition. In some embodiments, an individual who is susceptible to a disease, disorder, and/or condition will not develop the disease, disorder, and/or condition.

[1284] Synthetic: The term “synthetic” means produced, prepared, and/or manufactured by the hand of man. Synthesis of polynucleotides or polypeptides or other molecules of the present disclosure may be chemical or enzymatic.

[1285] Targeting: As used herein, “targeting” means the process of design and selection of nucleic acid sequence that will hybridize to a target nucleic acid and induce a desired effect.

[1286] Targeted Cells: As used herein, “target cells” or “targeted cells” refers to any one or more cells of interest. The cells may be found in vitro, in vivo, in situ or in the tissue or organ of an organism. The organism may be an animal, a mammal, a human and/or a patient. The target cells may be CNS cells or cells in CNS tissue.

[1287] Therapeutic Agent: The term “therapeutic agent” refers to any agent that, when administered to a subject has a therapeutic, diagnostic, and/or prophylactic effect and/or elicits a desired biological and/or pharmacological effect.

[1288] Therapeutically effective amount: As used herein, the term “therapeutically effective amount” means an amount of an agent to be delivered (e.g., nucleic acid, drug, therapeutic agent, diagnostic agent, prophylactic agent, etc.) that is sufficient, when administered to a subject suffering from or susceptible to an infection, disease, disorder, and/or condition, to treat, improve symptoms of, diagnose, prevent, and/or delay the onset of the infection, disease, disorder, and/or condition. In some embodiments, a therapeutically effective amount is provided in a single dose. In some embodiments, a therapeutically effective amount is administered in a dosage regimen comprising a plurality of doses. Those skilled in the art will appreciate that in some embodiments, a unit dosage form may be considered to comprise a therapeutically effective amount of a particular agent or entity if it comprises an amount that is effective when administered as part of such a dosage regimen.

[1289] Thoracic Region: As used herein, a “thoracic region” refers to a region of the spinal cord comprising the thoracic vertebrae T1, T2, T3, T4, T5, T6, T7, T8, T9, T10, T11, and T12.

[1290] Treating: As used herein, the term “treating” refers to partially or completely alleviating, ameliorating, improving, relieving, reversing, delaying onset of, inhibiting progression of, reducing severity of, and/or reducing incidence of one or more symptoms or features of a particular infection, disease, disorder, and/or condition. Treatment may be administered to a subject who does not exhibit signs of a disease, disorder, and/or condition and/or to a subject who exhibits only early signs of a disease, disorder, and/or condition for the purpose of decreasing the risk of developing pathology associated with the disease, disorder, and/or condition.

[1291] Unmodified: As used herein, “unmodified” refers to any substance, compound or molecule prior to being changed in any way. Unmodified may, but does not always, refer to the wild-type or native form of a biomolecule or entity. Molecules or entities may undergo a series of modifications whereby each modified product may serve as the “unmodified” starting molecule or entity for a subsequent modification.

[1292] Vector: As used herein, a “vector” is any molecule or moiety which transports, transduces or otherwise acts as a carrier of a heterologous molecule. Vectors of the present disclosure may be produced recombinantly and may be based on and/or may comprise adeno-associated virus (AAV) parent or reference sequence(s). Such parent or reference AAV sequences may serve as an original, second, third or subsequent sequence for engineering vectors. In non-limiting examples, such parent or reference AAV sequences may comprise any one or more of the following sequences: a polynucleotide sequence encoding a polypeptide or multi-polypeptide, having a sequence that may be wild-type or modified from wild-type and which sequence may encode full-length or partial sequence of a protein, protein domain, or one or more subunits of GCase protein and variants thereof; a polynucleotide encoding GCase protein and variants thereof, having a sequence that may be wild-type or modified from wild-type; and a transgene encoding GCase protein and variants thereof that may or may not be modified from wild-type sequence.

[1293] Viral construct vector: As used herein, a “viral construct vector” is a vector which comprises one or more polynucleotide regions encoding or comprising Rep and or Cap protein. A viral construct vector may also comprise one or more polynucleotide region encoding or comprising components for viral expression in a viral replication cell.

[1294] Viral genome: As used herein, a “viral genome” or “vector genome” is a polynucleotide comprising at least one inverted terminal repeat (ITR) and at least one encoded payload. A viral genome encodes at least one copy of the payload.

### EXAMPLES

[1295] The present disclosure is further illustrated by the following non-limiting examples. Experiments described in the Examples establish that enhanced AAV-based GCase gene therapy treatments are superior to and/or additive with wild-type GCase-based treatment in ameliorating GBA-related disorders.

### Cell Lines, Tissues, and Animal Models

[1296] In vitro experiments: Human fibroblasts from GBA patients (all 3 types) were obtained from Corielle. The following Gaucher patient fibroblasts were chosen based on significantly depleted GCase activity (4-6%) and availability of age- and race-matched healthy control fibroblasts: GM04394-fibroblast, GM00852-fibroblast, GM00877-fibroblast, GM05758-fibroblast from skin/inguinal area, and GM02937-fibroblast from skin/unspecified (all available from Corielle).

[1297] GBA-4L/PS-NA primary neurons can be generated from pregnant GBA-4L/PS-NA females from QPS. GBA-knockout (GBA-KO) neuroblastoma cell line (IMR-32 background, available from ATCC) was obtained from Synthego.

[1298] Animal models: GBA-4L/PS-NA mouse models (available at QPS): 4L/PS-NA mice express low level of prosaposin and saposin C, as well as GCase with a point mutation at position V394L/V394L. Strong enlargement of leukocytes and macrophages in visceral organs like spleen, thymus, lung and liver develop as early as 5 week of age. Most deficits and reduced muscle strength accompanied by neuroinflammation in the cortex, and hippocampus increase as animals age. There is significant increase in glucosylceramide and glucosylsphingosine. GBA-4L/PS-NA can survival up to 22 weeks. Homozygous Prnp-SNCA-A53T (M83) mice, by 8-months of age, develop α-syn aggregates and progressively severe motor phenotype.

### Example 1. Vector Design and Synthesis

[1299] An AAV viral genome expressing a payload region comprising a polynucleotide encoding a human GBA polypeptide is generated. The viral genome comprises polynucleotides encoding an AAV capsid of a serotype provided in Table 1. A promoter region regulates expression of the payload region. Widespread GBA distribution is achieved by use of a ubiquitous promoter, such as CBA, to achieve transduction within different CNS cell types.

[1300] Single-stranded codon optimized GBA cDNA sequence under ubiquitous CBA promoter packaged within AAV2 ITRs is generated (wtGBA). Enhanced GBA (enGBA) constructs (see Examples 2-5) are generated and compared against wtGBA. wtGBA and GFP reporter vectors are compared side-by-side to test multiplicity of infection for in vitro experiments. The final AAV transgene design nominations are made based on vectorized in vitro experiments and tested in the proposed in vivo models, including those used for GLP and tolerability studies.

[1301] PD-GBA patients demonstrate a global reduction in GCase levels in the CNS. Consequently, high GCase levels in CSF, caudate, substantia nigra, cortex and cerebellum is targeted. Although the disease pathology is largely neuronal, the therapeutic strategy is expected to benefit by transduction of other CNS cell-types, e.g. astrocytes, via cross-correction benefit.

[1302] In addition to PD-GBA, efficacy in secondary disease indications in patients with GBA mutations is tested, including Gaucher disease (including Neuronopathic Gaucher disease) and Dementia with Lewy bodies.

[1303] Transgenes designed as described above are tested for plasmid-level expression: all cassettes are engineered in single stranded AAV transgene configuration driven by ubiquitous CBA promoter flanked by AAV2 ITRs. The following transgene constructs are engineered and synthesized: 1) codon optimized GBA cDNA construct; 2) enhanced GBA construct comprising GBA cDNA and further encoding prosaposin/saposin C in the same transgene (optimal co-activator gene and linker sequences are selected for vectorization based on plasmid-level expression analysis); 3) enhanced GBA constructs comprising a cell-penetration peptide; and 4) enhanced GBA constructs comprising lysosomal targeting peptides (LTP); and 5) combinatorial enhanced GBA constructs comprising a combination of GBA cDNA, saposin sequence(s), lysosomal targeting sequence(s) and/or cell penetrating peptide sequence(s).

[1304] These constructs are tested for expression/GCase activity in cell culture with ITR plasmid transfections as a first pass. Specifically, plasmids are tested in CHO/HEK-293 cells at 48 hours post transfections. Both lysates and media are assessed for expression. Based on the results, GBA transgene ITR cassettes (wt, enGBA and enGBAcombo constructs) are selected for vectorization and evaluation within in vitro disease model setting.

[1305] Upon plasmid-level expression/GCase activity confirmation, select AAV ITR cassettes (wtGBA, enGBA and enGBAcombo) are packaged into HEK 293 small-scale AAV6 or AAV2 preps for initial in vitro evaluations.

### Example 2. Co-Administration of SapC Enhances GBA Gene Therapy

[1306] Viral genomes encoding a GBA protein can also be designed to further encode an enhancement element, e.g., a prosaposin protein, a Saposin C protein, or functional variant thereof. GCase coactivator Saposin C (SapC) is one of the cleavage products of saposin precursor protein Prosaposin. Saposin C is the essential activator of GCase lysosomal enzyme. In mouse models of PD-GBA and Gaucher disease, the combination of loss of function in GBA and Saposin C results in significantly exacerbated disease phenotype. Thus, AAV mediated co-delivery of GBA (e.g., a viral genome encoding a GBA protein, e.g., comprising the nucleotide sequence of SEQ ID NO: 1772, 1773, 1776, 1777, 1780, or 1781, or a functional variant thereof) and cDNA encoding a prosaposin protein (e.g., a prosaposin protein comprising the amino acid sequence of SEQ ID NO: 1750 or 1758, or a functional variant thereof; or encoded by a nucleotide sequence comprising SEQ ID NO: 1858 or 1859, or a functional variant thereof) or a Saposin C (SapC) protein or functional variant thereof (e.g., a SapC protein or functional variant thereof comprising the amino acid sequence of SEQ ID NO: 1788, 1789, 1791, or 1792; or encoded by the nucleotide sequence of SEQ ID NO: 1786, 1787, 1790, or 1791) is tested to increase potency of GBA gene therapy by enhancing catalytic activity of GCase enzyme.

### Example 3. Cell-Penetration Peptides Enhance Cellular Penetration/Uptake

[1307] Viral genomes encoding a GBA protein can also be designed to further encode an enhancement element, e.g., a cell penetrating peptide or functional variant thereof. Without wishing to be bound by theory, it is believed that a cell-penetration peptide (CPP) signal added to the GCase sequence of the transgenes of the disclosure results in increased cellular uptake of secreted GCase product in circulation, in cerebrospinal fluid, and in interstitial fluid from AAV-transduced cells; and this enhanced cell penetration thus increases cross-correction potential of the secreted GCase enzyme. Exemplary CPPs used herein include: HIV-derived TAT peptide (e.g., comprising the amino acid sequence of 1794 and/or encoded by the nucleotide sequence of SEQ ID NO: 1794), human apoliprotein B receptor binding domain (e.g., comprising the amino acid sequence of 1796 and/or encoded by the nucleotide sequence of SEQ ID NO: 1795), and/or human apolipoprotein E-II receptor binding domain (e.g., comprising the amino acid sequence of 1798 and/or encoded by the nucleotide sequence of SEQ ID NO: 1797).

### Example 4. CMA Recognition Sequences Enhance Intracellular Lysosomal Targeting

[1308] Viral genomes encoding a GBA protein can also be designed to further encode an enhancement element, e.g., a lysosomal targeting sequence or functional variant thereof.

[1309] Chaperone sequences including glycosylation-independent lysosomal targeting peptides (which is an M-6-P independent lysosomal targeting mechanism) have demonstrated ability to enable enhanced delivery of lysosomal enzyme product. GBA utilizes LIMP-2 (encoded by SCARB2 gene) as the lysosomal surface receptor (important for lysosomal localization). Co-delivery of SCARB2 with GBA provides an alternative strategy to enhance lysosomal targeting of GCase. Chaperone-mediated autophagy signals are incorporated into transgenes of the disclosure to increase lysosomal targeting of the GCase enzyme. Highly conserved recognition sequences of chaperone-mediated-autophagy (CMA) pathway is analyzed for improved lysosomal targeting of GCase enzyme. Such sequences include, for example, RNase A-derived CMA recognition sequence, HSC70-derived CMA recognition sequence, or hemoglobin-derived CMA recognition sequence.

[1310] Lysosomal targeting sequences (LTS) are also included in viral genomes encoding a GBA protein described herein. Exemplary LTS peptides used herein include LTS1 (e.g., comprising the amino acid sequence of SEQ ID NO 1800 and/or encoded by the nucleotide sequence of SEQ ID NO: 1799), LTS2 (e.g., comprising the amino acid sequence of SEQ ID NO 1802 and/or encoded by the nucleotide sequence of SEQ ID NO: 1801), LTS3 (e.g., comprising the amino acid sequence of SEQ ID NO 1804 and/or encoded by the nucleotide sequence of SEQ ID NO: 1803), LTS4 (e.g., comprising the amino acid sequence of SEQ ID NO 1806 and/or encoded by the nucleotide sequence of SEQ ID NO: 1805), and/or LTS5 (e.g., comprising the amino acid sequence of SEQ ID NO 1808 and/or encoded by the nucleotide sequence of SEQ ID NO: 1807).

### Example 5. Combinatorial Enhancements

[1311] Combinations of the aforementioned enhancement elements (Examples 2-4) are tested for ability of different combinations to additively or synergistically increase potency of AAV mediated delivery of GCase enzyme in vivo (by various possible combinations of enhanced cross-correction, enhanced lysosomal targeting, enhanced catalytic activity). These combinatorial approaches are also compared against a reference transgene (SEQ ID NO: 1759) for various aforementioned outcomes. Without wishing to be bound by theory, it is believed that transgene-level enhancements can increase the potency of AAV gene therapy and reduce the minimal efficacious dose for in vivo evaluations and clinic applications.

### Example 6. In Vitro Screen

[1312] Early in vitro experiments are designed to enable validation of the functional enhancements made in the GBA transgene by conducting side-by-side comparison against a reference GBA construct (e.g., SEQ ID NO: 1759). Experiments are run as AAV vectorized transduction studies on in vitro models of GBA LOF (patient fibroblasts or GBA knockout mouse primary neurons). Dose response is determined. Post-translational modifications and activity of the final GCase product can also be determined.

[1313] In vitro evaluations with AAV vectors packaging wtGBA, enGBA and enGBAcombo are carried out on patient fibroblasts with GBA mutations and primary neurons derived from WT and/or 4L/PS-NA GBA mouse model. In preparation for generating 3-point dose-response curves of all AAV.GBA vectors generated, AAV6.CBA.Luciferase reporter-gene transduction assay is performed on the 2 cell lines to verify optimal experimental conditions, e.g. Multiplicity Of Infection (MOI) for AAV6 vectors to be applied across in vitro screening. Once the in vitro experiments are optimized, head-to-head comparisons to identify optimal enGBA transgene configurations for further in vivo evaluations can be conducted.

[1314] In vitro dose-response comparisons of AAV-enGBA or AAV-wtGBA constructs (e.g., any one of SEQ ID NOs: 1759-1771 or 1809-1828, e.g., as described in Tables 18-21 or or 29-32) for GCase activity: To determine if GBA transgene enhancement strategies confer increased GCase activity in disease-relevant in vitro models, human fibroblasts with and without GBA mutations, and WT/GBA mutant mouse primary neurons are treated with AAV6 vectors packaging enhanced GBA viral genome variants at 3 different MOIs. At terminal time point, secreted and intracellular GCase expression and activity are measured in both media and cell lysate. Additionally, ddPCR based vector genome analysis is conducted to ensure successful in vitro gene transfer across different conditions.

[1315] In vitro comparison of AAV-enGBA constructs for subcellular localization: Whether the GBA transgene enhancement strategies confer increased lysosomal localization properties in healthy and disease relevant in vitro models is determined. Human fibroblasts with/without GBA mutations; and WT/GBA mutant mouse primary neurons are treated with AAV6 vectors packaging enhanced GBA viral genome variants. At terminal time point, cells are fixed and co-immunostained for HA (AAV transduction) and lysosomal markers (e.g. Lamp1). Transduction efficiency and % colocalization in the lysosomes are assessed for all AAV vectors using the Bio-Tek Cytation 5 for image analysis and quantification.

[1316] In vitro comparison of AAV-enGBA constructs for enzyme cross-correction: In addition to intracellular and secreted GCase activity, AAV-GBA transgene enhancement strategies are assessed for cross-correction properties in disease relevant in vitro conditions. Non-GBA/GBA human fibroblasts and GBA mutant/WT mouse primary neurons are treated with AAV6 vectors packaging enhanced GBA viral genomes. Conditioned media from transduced cells is collected at 24-, 48- and 72-hours post AAV treatments. In order to recapitulate in vivo cross-correction, untreated human fibroblasts and mouse primary neurons are then treated with different conditioned media for 24 hours. At this point, a subset of wells is co-immunostained for HA (visualization of cross-corrected GCase protein product) and lysosomal markers (e.g. Lamp1). Another subset of wells is lysed and evaluated for GCase activity. Cross-correction efficiency and % colocalization in the lysosomes is visualized and quantified for all AAV vector treatments.

[1317] In vitro GBA MOI dose-response study with AAVwtGBA and AAVenGBA vectors: Small-scale preps of optimal AAV capsid packaging wtGBA and enGBA constructs. A 3-point dose-response infection study is conducted with wtGBA and enGBA packaging AAVs. GBA-KO neuroblastoma cells (wtGBA neuroblastoma control) and Gaucher disease patient fibroblasts (healthy controls) are used for evaluations.

[1318] Select wtGBA or enGBA constructs are identified for further analysis in vivo.

### Example 7. Assay Development

[1319] One method of detecting GCase activity involves measuring turnover of an artificial substrate, 4-Methylumbelliferyl β-D-galactopyranoside (4-MUG) as described, for example in Rogers et al., “Discovery, SAR, and biological evaluation of non-inhibitory chaperones of glucocerebrosidase.” (2010), incorporated herein by reference in its entirety. The 4-MUG assay is used to determine GCase activity and GCase concentration in cell lysates.

[1320] Another method of detecting GCase activity involves use of a SensoLyte Blue Glucocerebrosidase assay (AnaSpec, Fremont, CA), a fluorometric assay, according to the manufacturer's instructions. Sensolyte Blue Glucocerebrosidase assay detects GCase activity using a fluorogenic analog-substrate, wherein the output is fluorescent excitation/emission at 365 nm/445 nm on a standard plate reader.

[1321] Fluorescence-based detection of hGBA in mouse tissue, and assessment of hGCase activity in mouse can be determined using the methods as described in Morabito, Giuseppe et al., “AAV-PHP. B-mediated global-scale expression in the mouse nervous system enables GBA gene therapy for wide protection from synucleinopathy.” Molecular Therapy 25.12 (2017): 2727-2742, the contents of which are incorporated by reference herein in their entirety. Alternative methods of visualizing GCase activity are described, for example, in Chao, Daniela Herrera Moro et al., “Visualization of active glucocerebrosidase in rodent brain with high spatial resolution following in situ labeling with fluorescent activity based probes.” PLoS One 10.9 (2015), the contents of which are incorporated herein by reference in their entirety. See also Witte, Martin D., et al. Nature Chemical Biology 6, 907-13 (2010), incorporated herein by reference in its entirety, describing “ultra-sensitive” cyclophellitol β-oxide (CBE) based probes for highly specific GBA labeling in vitro and in vivo. CBE, a GCase inhibitor, irreversibly binds GBA and inhibits its GCase activity, has been shown to cross the blood-brain-barrier, and induces biochemical, clinical and histological manifestations of Gaucher disease (Kuo, Chi-Lin, et al. “In vivo inactivation of glycosidases by conduritol B epoxide and cyclophellitol as revealed by activity-based protein profiling.” The FEBS journal 286.3 (2019): 584-600, incorporated herein by reference in its entirety).

[1322] For these assays, GCase/GBA protein concentration and activity are determined and normalized to total protein/activity levels in lysate. Negative control lysates are prepared from, for example, hippocampus and brainstem of vehicle (PBS) treated 6-8 week C57/B16 female mice (n=4). Positive control lysates are from human recombinant GBA-infected/expressing cells. Inhibitor control lysates are from human recombinant GBA+GBA-inhibitor infected/expressing cells to test specificity of the enzyme. An example GCase inhibitor for use in such studies is CBE. Vehicle/Lysis buffer/matrix controls consist of lysis buffer (Sigma) and substrate only. Background controls consist of substrate only. Minimal protein concentrations needed to observe GCase activity are identified by analysis of additional dilutions of lysate.

[1323] An assay is validated for evaluating increase in glucosylceramidase activity and glucosylceramidase protein concentration within in vitro GBA disease models (Gaucher patient fibroblasts and GBA-KO neuroblastoma cells) post AAV administration.

### Example 8. In Vivo Screen

[1324] In vivo target engagement in GBA disease model: After in vitro screening, target engagement in a GBA mouse model (GBA-4L/PS-NA) is demonstrated. A side-by-side comparison with AAV-wtGBA can be used to further bolster findings and demonstrate efficacy in vivo. In vivo evaluations determine whether AAV9-enGBA and AAV9-enGBAcombo candidate treatments selected during in vitro evaluations result in comparable/significantly higher GCase activity and reduction in GluCer and Glucosylsphingosine substrate-level reduction benefit as compared to AAV9-GBA reference construct in GBA a mouse model.

[1325] Up to 10 top enGBA constructs with significantly favorable attributes as compared to GBA reference construct using the GBA 4L/PS-NA mouse model (available at QPS) are tested. AAV-untreated non transgenic (NT) mice are used as controls for biochemical analyses. GBA-4L/PS-NA mice show relevant features of human GBA mutations including significantly reduced GCase activity and increased Glucosylceramide and Glucosylsphingosine as early as 5 weeks post birth. Neuroinflammation in the CTx and hippocampus is also seen in these mice.

[1326] In order to assess target engagement in the GBA disease model, intrastriatal administration of AAV9 vectors packaging GBA reference construct and up to top 10 of the enhanced GBA variant viral genomes at three doses 5×10⁹, 1×10¹⁰, 5×10¹⁰ vg/inj via bilateral injections is performed. Animals are euthanized 4 weeks post injections and CNS, peripheral tissues, and fluid compartments (serum and CSF) are collected for AAV biodistribution and transduction (GCase activities and GluCer substrate levels) analyses. Successful/lead candidates cause modest increase (˜30% over baseline) of GCase activity in GBA animal models. Untreated strain- and age-matched WT mice are included to compare physiological levels of GCase and GluCer in healthy animals. Thus, intrastriatal enGBA/enGBAcombo treatments result in equivalent/superior physiological restoration of GCase enzyme levels in the CNS tissues and CSF of GBA mutant mice as compared to GBA reference construct. Concomitantly similar comparison is also made for Glucosylceramide or Glycosylsphingosine levels for different treatments for substrate reduction. Up to 3 top AAV9-enGBA treatments are advanced for efficacy studies.

### Example 9. In Vivo Efficacy Evaluations

[1327] Dose selection: In vivo target engagement hits identified in Examples 2-5 are evaluated for GCase expression, target engagement, and efficacy based on readouts in murine disease models of GBA-PD. For efficacy determining in vivo studies, both GBA-4L/PS-NA and SNCA-A53T (M83) mice are used; WT animals are compared as controls. Both mouse models (GBA-4L/PS-NA and M83), n=6-10 mice per group, receive bilateral intrastriatal injections of 5×10, 1×10¹⁰, 5×10¹⁰ vg/inj (or other appropriate concentration based on study results) of the top hits. Mice are euthanized 4 or 8 weeks post-dose. CNS and peripheral tissues and fluid samples including cortex, striatum, thalamus, brain stem, cerebellum, CSF, serum and liver are collected. GCase expression and activity and GluCer substrate levels are measured. Early immunohistochemical readouts using IbaI, GFAP, and H&E stains of mouse brain, spinal cord and liver are performed in order to confirm tolerability at various AAV doses.

[1328] Efficacy evaluations will determine whether AAV-enGBA candidate treatments result in efficacious and sustained increase in GCase activity in the brain resulting in reduction in GCase substrate within GBA-4L/PS-NA mouse model. Based on dose selection studies, AAV vectors that are well-tolerated and showing >30% increase in GBA protein expression in relevant CNS tissues are further tested in a time-response study. Briefly, GBA-4L/PS-NA mice (n=6-10) are injected with an intrastriatal injection of lead constructs (dose determined based on dose-selection study), multiple CNS and peripheral tissues and fluid compartments (serum and CSF) are collected at various time-points (e.g. 4, 8 and 12 weeks) and GCase expression and activities, substrate reduction in the CNS and periphery are quantified. Lysosomal localization of the transduced GCase enzyme product are confirmed with immune-colocalization of AAV transduction with lysosomal marker.

[1329] Further evaluations will assess whether AAV-enGBA candidate treatments result in efficacious and sustained increase in GCase activity in the brain resulting in reduction of α-Syn pathology within GBA1/α-Synuclein A53T mouse model. Based on dose selection study, AAV vectors that are well-tolerated and showing >30% increase in GBA protein expression in relevant CNS tissues are further tested in SNCA-A53T (M83) mouse model. M83 mice are known to start developing α-syn pathology at 6-7 months of age with progressive motor deficits. M83 mice (n=8-12) are injected with most efficacious constructs (Intrastriatal; dose according to study results) at ˜6 months of age; and evaluated for GCase expression and activity, and α-syn pathology 3 months post administration. Previous studies have shown therapeutic benefit of AAV-GBA in reducing α-syn aggregates in SNCA transgenic mouse models. Here, in addition to GCase expression and activities, AAV-enGBA candidate treatments which result in physiological restoration of GCase enzyme levels (>30%) in the CNS tissue and CSF are evaluated for α-syn pathology reduction in A53T (M83) mice using immunohistochemical analyses.

### Example 10. Natural History Study

[1330] In parallel with Stage 1 screening efforts, phenotypic, biochemical and immunohistochemical analysis were performed on 4L/PS-NA, 4 L control, and wild-type mice to establish disease-relevant efficacy readouts and timelines.

[1331] GBA and Saposin C expression levels were determined in forebrain, midbrain, and hindbrain sections of the mice by LC-MS/MS, and were normalized to actin levels. Consistently across 5, 12, and 18 weeks of age, in all regions of the brain, 4L/PS-NA mice had lower GBA expression levels compared to that of wild-type mice and similar levels of GBA expression as 4 L mice (Table 23). The brain of wild-type mice generally showed a trend of increased GBA expression in the hindbrain relative to the midbrain the forebrain (Table 23). Additionally, a decrease in GBA levels in the forebrain and midbrain was observed in the wild-type mice between 5 weeks and 12-18 weeks of age.

TABLE 23
Avg. GBA level (GBA/Actin) in GBA-related disease mouse models

| | 5 Weeks | | | 12 Weeks | | | 18 Weeks | | |
|---|---|---|---|---|---|---|---|---|---|
| | Region of Brain | | | Region of Brain | | | Region of Brain | | |
| Animal | Fore- | Mid- | Hind- | Fore- | Mid- | Hind- | Fore- | Mid- | Hind- |
| Model | brain | brain | brain | brain | brain | brain | brain | brain | brain |
| 4L/PS- | 473.5 | 715.2 | 996.7 | 591.0 | 760.5 | 779.0 | 801.8 | 726.6 | 907.6 |
| NA | | | | | | | | | |
| 4L | 687.5 | 676.8 | 939.8 | 614.5 | 764.9 | 702.8 | 512.3 | 691.8 | 1094.2 |
| Control | | | | | | | | | |
| Wild- | 3463.2 | 3644.1 | 5377.4 | 2616.6 | 2902.2 | 4468.3 | 2551.3 | 3273.6 | 5129.8 |
| type | | | | | | | | | |

[1332] Saposin C (SapC)/Actin levels in 4U/PS-NA mice were lower than those observed in the 4L, or wild-type mice in the forebrain, midbrain, and hindbrain (Table 24). SapC levels increased in the brains of wild-type mice, with the highest level quantified at 18 weeks of age (Table 24).

TABLE 24
Avg. SapC level (SapC/Actin) in GBA-related disease mouse models

| | 5 Weeks | | | 12 Weeks | | | 18 Weeks | | |
|---|---|---|---|---|---|---|---|---|---|
| | Region of Brain | | | Region of Brain | | | Region of Brain | | |
| Animal | Fore- | Mid- | Hind- | Fore- | Mid- | Hind- | Fore- | Mid- | Hind- |
| Model | brain | brain | brain | brain | brain | brain | brain | brain | brain |
| 4L/PS- | 232.1 | 289.6 | 430.6 | 315.8 | 432.1 | 523.3 | 227.5 | 552.8 | 591.4 |
| NA | | | | | | | | | |
| 4L | 748.6 | 1102.9 | 1769.3 | 844.2 | 1486.5 | 1506.3 | 646.5 | 1123.6 | 1546.4 |
| Control | | | | | | | | | |
| Wild- | 1500.3 | 2283.3 | 3087.9 | 1662.3 | 1971.0 | 2968.9 | 1656.3 | 2143.9 | 3253.1 |
| type | | | | | | | | | |

[1333] At five-weeks, 12 weeks, and 18 weeks of age, GCase activity also was measured in forebrain, midbrain and hindbrain tissue sections of 4L/PS-NA (model having decreased GCase and prosaposin), 4 L control (model having decreased GCase) and wild-type (normal GCase and prosaposin) mice (Table 7).

[1334] At 5 weeks of age, decreased GCase activity was confirmed in both the 4U/PS-NA and 4L, control mice, with significant GCase deficits as compared to wild-type mice. GCase activity was not significantly different between the 4L/PS-NA and 4L, control mice (Table 7).

TABLE 7
Avg. GCase activity [RFU per mL] in GBA-related disease mouse models

| | 5 Weeks | | | 12 Weeks | | | 18 Weeks | | |
|---|---|---|---|---|---|---|---|---|---|
| | Region of Brain | | | Region of Brain | | | Region of Brain | | |
| Animal | Fore- | Mid- | Hind- | Fore- | Mid- | Hind- | Fore- | Mid- | Hind- |
| Model | brain | brain | brain | brain | brain | brain | brain | brain | brain |
| 4L/PS- | 4318.36 | 6448.92 | 5581.51 | 6343.1 | 6423.7 | 5386.7 | 4109.2 | 6466.4 | 5981.6 |
| NA | | | | | | | | | |
| 4L | 4442.15 | 5614.69 | 5598.62 | 4969.0 | 4640.2 | 6798.4 | 5837.2 | 5915.6 | 8310.4 |
| Control | | | | | | | | | |
| type | 9531.29 | 10448.20 | 10520.70 | 8379.2 | 7596.1 | 9286.1 | 5488.1 | 9730.8 | 8227.2 |
| Wild- | | | | | | | | | |

[1335] Similarly, in 12 and 18 weeks old mice, decreased GCase activity was quantified in both the 4L/PS-NA and 4 L control mice, with significant GCase deficits as compared to wild-type mice (Table 7). GCase activity was also not significantly different between the 4U/PS-NA and 4 L control mice at 12 and 18 weeks of age (Table 7).

[1336] Also, at five-weeks, 12 weeks, and 18 weeks of age, GBA substrate levels, specifically glucosylsphingosine (GlcSph) and glucosylceramide (GlcCer), were measured by LC-MS/NMS in forebrain, midbrain and hindbrain tissue sections of 4L/PS-NA (model having decreased GCase and prosaposin), 4 L control (model having decreased GCase) and wild-type (normal GCase and prosaposin) mice and normalized to actin. As shown in Table 25, the greatest increase in GlcSph levels was observed in the brains of the 4L/PS-NA mice followed by 4L-control mouse brains, relative to the wild-type mouse. Additionally, GlcSph levels in the 4U/PS-NA mouse brains and 4 L control mouse brains increased with age and higher levels were observed in the hindbrain, as compared to the forebrain or midbrain. These data demonstrate the effects of reduced GCase activity and decreased GBA levels in these mice, as measured above.

TABLE 25
Avg. glucosylsphingosine level (GlcSph/Actin) in GBA-related disease mouse models

| | 5 Weeks | | | 12 Weeks | | | 18 Weeks | | |
|---|---|---|---|---|---|---|---|---|---|
| | Region of Brain | | | Region of Brain | | | Region of Brain | | |
| Animal | Fore- | Mid- | Hind- | Fore- | Mid- | Hind- | Fore- | Mid- | Hind- |
| Model | brain | brain | brain | brain | brain | brain | brain | brain | brain |
| 4L/PS- | 1086.1 | 1050.9 | 1384.0 | 1792.6 | 1897.0 | 2543.6 | 2571.0 | 3113.1 | 5672.8 |
| NA | | | | | | | | | |
| 4L | 268.0 | 317.0 | 308.7 | 404.5 | 435.2 | 520.1 | 465.8 | 453.4 | 455.1 |
| Control | | | | | | | | | |
| Wild- | 0 | 0 | 0 | 0 | 0 | 0 | 0 | 0 | 0 |
| type | | | | | | | | | |

[1337] As shown in Table 26, the levels of GlcCer was increased in the 4L/PS-NA mouse brains, and the levels were higher in the hindbrain as compared to the forebrain and the midbrain. Levels of GlcCer were also higher at 18 weeks of age in the 4L/PS-NA mouse brains. These data also support the effects of reduced GCase activity and decreased GBA levels in these mice, as measured above.

TABLE 26
Avg. glucosylceramide (GlcCer) 18:1/18:0/Actin in GBA-related disease mouse models

| | 5 Weeks | | | 12 Weeks | | | 18 Weeks | | |
|---|---|---|---|---|---|---|---|---|---|
| | Region of Brain | | | Region of Brain | | | Region of Brain | | |
| Animal | Fore- | Mid- | Hind- | Fore- | Mid- | Hind- | Fore- | Mid- | Hind- |
| Model | brain | brain | brain | brain | brain | brain | brain | brain | brain |
| 4L/PS- | 2179.2 | 1875.6 | 2247.5 | 7894.8 | 6425.0 | 12123.0 | 14774.5 | 15368.6 | 25601.5 |
| NA | | | | | | | | | |
| 4L | 695.8 | 528.6 | 454.7 | 703.2 | 547.7 | 488.9 | 738.6 | 627.3 | 545.8 |
| Control | | | | | | | | | |
| Wild- | 510.4 | 361.9 | 332.2 | 375.6 | 359.0 | 355.7 | 517.9 | 439.6 | 374.2 |
| type | | | | | | | | | |

[1338] Taken together, these data support use of the 4L/PS-NA mice as model for neuropathic Gaucher disease, and for assessing efficacy of viral constructs encoding a GBA protein e.g., constructs GBA_VG1-GBA_VG34, e.g., as described in Tables 18-21 or 29-32 above.

### Example 11: Exemplary Lead Identification

### A. Generation of Wild-Type and Enhanced GBA Viral Genome Variants

[1339] Viral genomes were designed for AAV delivery of a GBA protein, e.g., a wild-type GBA protein (wtGBA) that does not further comprise an enhancement element; or an enhanced GBA protein (enGBA) that further comprises an enhancement element described herein, e.g., a prosaposin protein, a SapC protein, or functional variant thereof; a cell penetrating peptide (e.g., an ApoEII peptide, a TAT peptide, and/or an ApoB peptide) or functional variant thereof; a lysosomal targeting signal (LTS) or functional variant thereof; or a combination thereof (enGBAcombo). The nucleotide sequence from 5′ ITR to 3′ ITR of the viral genome constructs that comprise a transgene encoding an GBA protein with or without an enhancement element, are provided as GBA_VG1-GBA_VG33 herein, which are SEQ ID NOs: 1759-1771, 1809-1828, or 1870, respectively. These constructs are also summarized in Table 18, as well as Tables 19-21 and 29-32.

[1340] Each of these viral genome constructs comprise a nucleic acid comprising a transgene encoding a GBA protein. The transgene was designed to comprise a wild type nucleotide sequence encoding GBA (SEQ ID NO: 1777), or one of two different codon optimized nucleotide sequence encoding a GBA protein, SEQ ID NO: 1773 or 1781. In designing these viral genome constructs for expression of GBA, several promoters were selected and tested (e.g., promoters as described in Table 5), including a CMV promoter (SEQ ID NO: 1833); a CMVie enhancer and a CMV promoter (SEQ ID NO: 1831 and 1832, respectively); a CMVie enhancer and a CBA promoter (SEQ ID NO: 1831 and 1834 respectively); or an EF-1a promoter variant (SEQ ID NOs: 1839 or 1840).

[1341] Some of the viral genome constructs further comprised an intron region, of SEQ ID NO: 1842; a nucleotide sequence encoding a signal sequence (SEQ ID NO: 1850, 1851, or 1852); and/or 4 copies of a miR183 binding site (SEQ ID NO: 1847) separated by a spacer (GATAGTTA), or miR183 binding series (SEQ ID NO: 1849). The viral constructs comprised a 5′ ITR of SEQ ID NO: 1829; and a 3′ ITR of SEQ ID NO: 1830. The polyadenylation sequence (SEQ ID NO: 1846) was the same across all viral genome constructs designed.

[1342] Wild-type GBA viral genome variants encoding a GBA protein were prepared as described and are outlined in Table 18-21 or 29-32 (e.g., GBA_VG1, GBA_VG17-GBA_VG21, GBA_VG26, and GBA_VG33; SEQ ID NOs: 1759, 1812-1816, 1821, and 1828).

[1343] Enhanced GBA viral genome variants encoding a GBA protein and an enhancement element described herein (e.g., an enhancement element of Table 4 or 16) were prepared and are outlined in Table 18 (GBA_VG2-GBA_VG16, GBA_VG22-GBA_VG25, GBA_VG27-GBA_VG32; SEQ ID NO: 1760-1771, 1809-1811, 1817-1820, 1822-1827). The enhanced viral genomes were designed to further encode an enhancement element comprising a prosaposin protein (encoded by SEQ ID NO: 1859); saposin C protein or a functional variant (encoded by SEQ ID NO: 1787 or 1791); a cell penetrating peptide, including an ApoEII peptide (encoded by SEQ ID NO: 1797), a TAT protein (encoded by SEQ ID NO: 1793), or an ApoB peptide (encoded by SEQ ID NO: 1795); a lysosomal targeting signal (LTS) (encoded by any of SEQ ID NOs: 1799, 1801, 1803, 1805, or 1807); or a combination thereof. Some of the enhanced viral genome constructs further comprise a nucleotide sequence encoding a signal sequence (e.g., SEQ ID NO: 1856), and/or a linker (e.g., SEQ ID NO: 1724, 1726, or 1730). Some constructs, e.g., those encoding a prosaposin protein or a saposin C protein, encode a cleavable linker such as a furin and/or T2A cleavage site (encoded by SEQ ID NO: 1724 or 1726, respectively). Some constructs, e.g., those encoding a cell penetrating peptide, encode a flexible, glycine-serine linker (encoded by SEQ ID NO: 1730).

[1344] The viral construct GBA_VG1 (SEQ ID NO: 1759), comprising the nucleotide sequence of SEQ ID NO: 1781, with no additional enhancement elements (e.g., a saposin protein, a lysosomal targeting sequence, a cell penetrating sequence, or a combination thereof) was used as a reference or benchmark construct, e.g., in the experiments described herein.

### B. In-Vitro Assessment of Payload Expression

[1345] Prior to vectorization, the wild-type and enhanced GBA viral genome variants were first used to validate the tools necessary for conducting lead identification studies, such as, but not limited to assays and cell-systems.

[1346] LC-MS/MS assays were established to quantify GBA (ng/mg of total protein) and SapC (ng/mg of total protein) in lysates collected from HEK293 cells transfected with a wild-type or enhanced GBA viral genome variant plasmid DNA including, GBA_VG1 (SEQ ID NO: 1759, encoding a GBA protein), GBA_VG8 (SEQ ID NO: 1766, encoding a GBA protein and a prosaposin protein of SEQ ID NO: 1785), GBA_VG9 (SEQ ID NO: 1767, encoding a GBA and a Saposin C protein of SEQ ID NO: 1789) and GBA_VG10 (SEQ ID NO: 1768, encoding a GBA protein and a Saponin C protein of SEQ ID NO: 1758). Lysates were also run on Western blot to confirm the presence of expressed GBA.

[1347] These validation experiments demonstrated that transfection of cells with the wild-type or enhanced GBA variant construct DNA resulted in increases in measured GBA or SapC in the lysate as determined by LC-MS/MS and Western blot when compared to lysate of untransfected cells.

### C. In-Vitro Cell-System Assessment and Validation

[1348] Additional LC-MS/MS assays were used to quantify GCase activity and/or levels of GBA substrates (e.g., glycosphingolipids (GlcSph) quantified as ng/mg Actin in the FIG. 1A, or as ng/mg Lamp 1 in FIG. 1B) in Gaucher disease patient derived (GM04394-fibroblast (GD1 patient), GM00852-fibroblast (GD1 patient), GM00877-fibroblast (GD2 patient) or healthy control (GM05758-fibroblast from skin/inguinal area and GM02937-fibroblast from skin/unspecified) fibroblasts. Again, these quantifications were supplemented with Western blot analyses.

[1349] As anticipated, GBA substrate levels, specifically glycosphingolipids, as quantified as ng/mg Actin in FIG. 1A, or as ng/mg Lamp 1 in the in FIG. 1B, were increased across all three Gaucher disease patient derived fibroblast samples, as compared to control fibroblast levels, when measured by LC-MS/MS (FIGS. 1A-1B). Meanwhile, GBA protein detection (measured as the concentration of GBA in the cell lysate relative to total protein (ng/mg total protein) in GD patient fibroblasts was decreased compared to the healthy controls (FIG. 1C).

[1350] Quantification of GCase activity in lysate collected from Gaucher disease patient derived fibroblasts transfected with enhanced GBA viral genome variants was measured as Relative Fluorescence units per ng protein (RFU per ng protein) and was shown to be decreased when by 96.5%, 98.4% and 99.2% (GM04394-fibroblast, GM00852-fibroblast, GM00877-fibroblast, respectively) as compared to an average of the normal controls. Data are shown below in Table 8.

TABLE 8
Avg. GCase activity[RFU per ng protein] in
Gaucher disease patient derived fibroblasts

| Fibroblast cell line | GCase activity |
|---|---|
| GM04394 | 465.53 |
| GM00852 | 221.29 |
| GM00877 | 109.44 |
| GM05758 (Control) | 14997.59 |
| GM02937 (Control) | 11750.07 |

[1351] Quantification of GBA substrate in lysate collected from Gaucher disease patient derived fibroblasts transfected with enhanced GBA viral genome variants was measured as glucosylsphingosine/Lamp1 (ng/mg Lamp1) and was shown to be increased when compared to control. Data are shown below in Table 9.

TABLE 9
Avg. glucosylsphingosine (ng/mg Lamp1) in
Gaucher disease patient derived fibroblasts

| Fibroblast cell line | Glucosylsphingosine |
|---|---|
| GM04394 | 716.33 |
| GM00852 | 710.67 |
| GM00877 | 4348.00 |
| GM05758 (Control) | 146.00 |
| GM02937 (Control) | 134.5 |

D. In-Vitro Packaging into AAV Particles and Capsid Selection

[1352] The wild-type and enhanced GBA viral genome variants (GBA_VG1 to GBA_VG13; SEQ ID NO: 1759-SEQ ID NO: 1771) were each packaged into AAV2 or AAV6 capsids.

[1353] In vitro capsid selection studies were conducted wherein cells were transduced with AAV particles comprising an enhanced GBA viral genome variant packaged in AAV2 or AAV6 at a series of increasing MOIs (1.00E1, 1.00E2, 1.00E3, 1.00E4, 1.00E5 and 1.00E6) and vector genome per cell quantified. Based on transduction efficiency, AAV2 was selected for further studies.

### E. In-Vitro Dose-Range Finding Studies

[1354] AAV particles comprising reference viral genome GBA_VG1 (SEQ ID NO: 1759) was screened in a dose-range finding study, wherein GCase activity was quantified subsequent to transduction of cells with an increasing series of MOIs (1.00E1, 1.00E2, 1.00E3, 1.00E4, 1.00E5 and 1.00E6). Based on these findings, a mid-range MOI of 1.00E3 was selected for further studies.

### F. AAV2-GBA Transduction in Gaucher Disease Patient Fibroblast Cells

[1355] AAV2-GBA particles comprising viral genomes GBA_VG1 (SEQ ID NO: 1759), GBA_VG2 (SEQ ID NO: 1760), GBA_VG3 (SEQ ID NO: 1761), GBA_VG4 (SEQ ID NO: 1762), GBA_VG5 (SEQ ID NO: 1763), GBA_VG6 (SEQ ID NO: 1764), GBA_VG7 (SEQ ID NO: 1765) were administered at MOI 1.00E3 to Gaucher disease patient fibroblasts (GM00877-fibroblasts) and GCase activity quantified and normalized to mg protein. The results are shown in Table 10 below.

TABLE 10
GCase in Gaucher disease patient fibroblasts

| | | GCase Activity |
|---|---|---|
| Construct ID | SEQ ID NO: | [RFU per mL] |
| GBA_VG1 | 1759 | 9814.48 |
| | | 16616.84 |
| | | 3686.62 |
| | | 3478.15 |
| Avg. | | 8399.02 |
| GBA_VG2 | 1760 | 6375.98 |
| | | 3150.89 |
| | | 7426.56 |
| | | — |
| Avg. | | 5651.14 |
| GBA_VG3 | 1761 | 11580.6 |
| | | 22812.97 |
| | | 14152.31 |
| | | — |
| Avg. | | 16181.96 |
| GBA_VG4 | 1762 | 10963.45 |
| | | 11695.58 |
| | | 7980.39 |
| | | — |
| Avg. | | 10213.14 |
| GBA_VG5 | 1763 | 17076.48 |
| | | 8665.12 |
| | | 16343.61 |
| | | — |
| Avg. | | 14028.40 |
| GBA_VG6 | 1764 | 5117.13 |
| | | 3391.47 |
| | | 4177.62 |
| | | — |
| Avg. | | 4228.74 |
| GBA_VG7 | 1765 | 9842.00 |
| | | 9366.20 |
| | | 13187.36 |
| | | — |
| Avg. | | 10798.52 |

[1356] Western blot analysis further confirmed a ˜70 kD mature GBA protein in those samples transduced with AAV2-enhanced GBA particles. Negligible GBA was evident in Gaucher disease patient derived fibroblast samples that had not been transduced with an AAV2-enhanced GBA particle.

[1357] Additional AAV2 particles comprising viral genome constructs encoding a GBA protein and an enhancement element such as saposin C protein, a lysosomal targeting signal (LTS), a cell penetrating peptide (CPP), or a combination thereof (e.g., as outlined in Table 18 above), were vectorized for screening at an MOI of 10^{3.5} in Gaucher disease (GD) patient-derived fibroblasts (GD-II GM00877). The vectorized viral genome constructs included GBA_VG1 (SEQ ID NO: 1759), GBA_VG9 (SEQ ID NO: 1767), GBA_VG10 (SEQ ID NO: 1768), GBA_VG11 (SEQ ID NO: 1769), GBA_VG6 (SEQ ID NO: 1764), GBA_VG7 (SEQ ID NO: 1765), GBA_VG12 (SEQ ID NO: 1770), GBA_VG3 (SEQ ID NO: 1761), GBA_VG4 (SEQ ID NO: 1762), GBA_VG₅ (SEQ ID NO: 1763), and GBA_VG13 (SEQ ID NO: 1771). GCase activity was quantified in the pelleted patient cells (FIG. 2A) and the corresponding conditioned media (FIG. 2B), as relative fluorescence units per mg protein (RFU per mg protein). Treatment with six of the vectorized viral genome constructs (GBA_VG9, GBA_VG6, GBA_VG7, GBA_VG3, GBA_VG4, and GBA_VG5) resulted in an increase in GCase activity measured in the pelleted GD patient fibroblasts (FIG. 2A) and the corresponding conditioned media (FIG. 2B).

[1358] An LC-MS/MS assay was then used to quantify levels of the GBA substrate glycosylsphingosine (GlcSph, ng/mg Lamp1) in the cell lysis from GD II patient-derived fibroblasts transduced with the viral genomes constructs GBA_VG1 (SEQ ID NO: 1759), GBA_VG9 (SEQ ID NO: 1767), GBA_VG6 (SEQ ID NO: 1764), GBA_VG7 (SEQ ID NO: 1765), GBA_VG3 (SEQ ID NO: 1761), GBA_VG4 (SEQ ID NO: 1762), and GBA_VG5 (SEQ ID NO: 1763) vectorized in AAV2 particle. As shown in FIG. 3, the buildup of GBA substrate levels was reduced significantly in GD patient-derived fibroblasts transduced with the AAV2 GBA vectors, compared to the no AAV control. The data demonstrated that the AAV-mediated gene therapy can be effective in increasing GCase activity to treat diseases associated with GBA deficiency.

### Example 12: AAV2 Enhanced GBA Vectors Containing Combinations of Enhancement Elements

[1359] Additional viral genome constructs were generated encoding a GBA protein, wherein the GBA protein is encoded by the wild-type nucleotide sequence of SEQ ID NO: 1777, or the codon optimized nucleotide sequence of SEQ ID NO: 1773, and further encoding an enhancement element such as a cell penetration peptide (CPP) (e.g., ApoEII), a lysosomal targeting sequence (e.g., LTS2), a SapC protein, or combination thereof. These constructs also comprised different promoters, including a CBA, a CMV, or a CAG promoter. These exemplary GBA viral genome constructs are included in Table 18-20.

[1360] GD-II patient fibroblasts (GM00877) were transduced with an AAV2 vector comprising the viral genome constructs: GBA_VG1 (SEQ ID NO: 1759), GBA_VG14 (SEQ ID NO: 1809), GBA_VG15 (SEQ ID NO: 1810), GBA_VG16 (SEQ ID NO: 1811), GBA_VG17 (SEQ ID NO: 1812), GBA_VG18 (SEQ ID NO: 1813), GBA_VG19 (SEQ ID NO: 1814), and GBA_VG20 (SEQ ID NO: 1815), at an MOI of 10^{2.5} (first bar), 10³ (second bar), 10^{3.5} and 10⁴. The GCase activity was quantified on day 7 post-transduction after lysing the treated patient cells (FIG. 4A), as relative fluorescence units per mg protein (RFU per mg protein As shown in FIG. 4A, all viral genome constructs tested resulted in a dose-responsive increase in GCase activity in GD II patient-derived fibroblasts. The GBA_VG20 construct comprising the CAG promoter operably linked to a codon-optimized nucleotide sequence of SEQ ID NO: 1773 encoding a GBA protein vectorized in AAV2 vector showed significantly higher GCase activity compared to the GBA_VG1 construct comprising a CMVie enhancer and CBA promoter operably linked to the nucleotide sequence of SEQ ID NO: 1781 encoding the GBA protein at the MOI of 10⁴.

[1361] An LC-MS/MS assay was then used to quantify levels of the GBA substrate glycosylsphingosine (GlcSph, ng/mg Lamp1) in the cell lysis from GD II patient-derived fibroblasts transduced with the viral genomes constructs GBA_VG1 (SEQ ID NO: 1759), GBA_VG14 (SEQ ID NO: 1809), GBA_VG15 (SEQ ID NO: 1810), GBA_VG16 (SEQ ID NO: 1811), GBA_VG17 (SEQ ID NO: 1812), GBA_VG18 (SEQ ID NO: 1813), GBA_VG19 (SEQ ID NO: 1814), and GBA_VG20 (SEQ ID NO: 1815) vectorized in an AAV2 vector. As shown in FIG. 4B, all viral genome constructs tested reduced GBA substrate buildup indicating successful target engagement within GD patient cells.

### Example 13: Bioinformatics Analysis of Wild-Type and Codon-Optimized Sequences Encoding a GBA Protein

[1362] Bioinformatics analysis on the sequence level was performed to differentiate between viral genome constructs encoding a GBA protein, wherein the GBA protein is encoded by a wild-type nucleotide sequence of SEQ ID NO: 1777 (e.g., the nucleotide sequence encoding the GBA protein of GBA_VG21, as shown in Table 18), a first codon-optimized nucleotide sequence of SEQ ID NO: 1773 (e.g., the nucleotide sequence encoding the GBA protein of GBA_VG17, as shown in Table 18-20), or a second codon-optimized of SEQ ID NO: 1781 (the nucleotide sequence encoding the GBA protein of GBA_VG1, as shown in Table 18). Briefly, sequence-level differentiation criteria, such as GC content, RNA accessibility, miRNA binding, transcriptional motifs and splicing events, were assessed using mRNA-based sequence analysis tools (RegRNA 2.0 by Chang et al., 2013, BMC Bioinformatics, 14, Suppl 2:S4; miRDB by Chen & Wang, 2020, Nucleic Acids Res, 48(D1): D127-D131; the contents of each herein incorporated by reference in its entirety).

[1363] Based on the above analysis using miRDB (Chen & Wang, 2020, supra) with respect to miRNA binding, a series of putative recognition sites were found in the construct with first codon-optimized nucleotide sequence encoding a GBA protein of SEQ ID NO: 1773 (GBA_VG17). Specifically, this codon-optimized sequence of SEQ ID NO: 1773 had 42 total miRNA binding sites including 4 high confidence hits. Among those, 21 sites were distinct from the second codon optimized sequence of SEQ ID NO: 1781 of GBA_VG1, and 11 sites were new and not present in the wild type nucleotide sequence of SEQ ID NO: 1777 of GBA_VG21. This is summarized in Table 11. A second miRNA analysis tool (RegRNA 2.0 by Chang et al., 2013 supra), as shown in Table 28, further confirmed that miRNA binding sites tended to be unique to each sequence codon optimized sequence analyzed.

TABLE 11
miRDB Summary of miRNA Binding

| | WT (SEQ ID | WT (SEQ ID | SEQ ID | |
|---|---|---|---|---|
| | NO: 1777) | NO: 1777) | NO: 1773 | “High |
| | vs SEQ ID | vs SEQ ID | vs SEQ ID | Confidence” |
| | NO: 1781 | NO: 1773 | NO: 1781 | miRNA |
| SEQ ID | N/A | 30 | 21 | 4 |
| NO: 1773 | | | | |
| (GBA_VG17) | | | | |
| Unique | | | | |
| Wild Type | 42 | 41 | N/A | 1 |
| (SEQ ID | | | | |
| NO: 1777) | | | | |
| (GBA_VG21) | | | | |
| Unique | | | | |
| SEQ ID | 27 | N/A | 17 | 2 |
| NO: 1781 | | | | |
| (GBA_VG1) | | | | |
| Unique | | | | |
| Similar | 11 | 12 | 21 | 0 |

TABLE 28
RegRNA 2.0 Summary of miRNA Binding

| | WT (SEQ ID | WT (SEQ ID | SEQ ID |
|---|---|---|---|
| | NO: 1777) vs | NO: 1777) vs | NO: 1773 vs |
| | SEQ ID NO: | SEQ ID NO: | SEQ ID |
| | 1781 | 1773 | NO: 1781 |
| SEQ ID NO: 1781 | 3 | N/A | 3 |
| (GBA_VG1) | | | |
| Unique | | | |
| SEQ ID NO: 1773 | N/A | 2 | 3 |
| (GBA_VG17) | | | |
| Unique | | | |
| WT (SEQ ID NO: | 6 | 6 | N/A |
| 1777) (GBA_VG21) | | | |
| Unique | | | |
| Similar | 0 | 1 | 0 |

[1364] With respect to the analysis of the transcriptional motifs, the first codon-optimized sequence of SEQ ID NO: 1773 in GBA_VG17 had 70 total sites; 32 sites were distinct from the second codon optimized sequence of SEQ ID NO: 1781 in GBA_VG1, and 54 sites were new and not present in the wild type sequence of SEQ ID NO: 1777 in GBA_VG21 (Table 12).

TABLE 12
RegRNA 2.0 summary of regulatory motifs

| | WT (SEQ ID | WT (SEQ ID | SEQ ID |
|---|---|---|---|
| | NO: 1777) | NO: 1777) | NO: 1773 |
| | vs SEQ ID | vs SEQ ID | vs SEQ ID |
| | NO: 1781 | NO: 1773 | NO: 1781 |
| SEQ ID NO: 1781 | 49 | N/A | 24 |
| (GBA_VG1) | | | |
| Unique | | | |
| SEQ ID NO: 1773 | N/A | 54 | 32 |
| (GBA_VG17) | | | |
| Unique | | | |
| Wild Type | 39 | 34 | N/A |
| (SEQ ID | | | |
| NO: 1777) | | | |
| (GBA_VG21) | | | |
| Unique | | | |
| Similar | 11 | 16 | 38 |

[1365] With respect to the splicing events analysis, the first codon-optimized sequence of SEQ ID NO: 1773 in GBA_VG17 had 5 total sites; 3 sites were distinct form the second codon-optimized sequence of SEQ ID NO: 1781 GBA sequence in GBA_VG1, and all 3 of these were completely new and not present in the wild-type sequence of SEQ ID NO: 1777 in GBA_VG21 (Table 13).

TABLE 13
Summary of RegRNA 2.0 Splice Events

| | WT (SEQ ID | WT (SEQ ID | SEQ ID |
|---|---|---|---|
| | NO: 1777) vs | NO: 1777) vs | NO: 1773 vs |
| | SEQ ID NO: | SEQ ID NO: | SEQ ID |
| | 1781 | 1773 | NO: 1781 |
| Wild Type (SEQ ID NO: | 6 | 6 | N/A |
| 1777) (GBA_VG21) | | | |
| Unique | | | |
| SEQ ID NO: 1773 | N/A | 5 | 3 |
| (GBA_VG17) Unique | | | |
| SEQ ID NO: 1781 | 3 | N/A | 2 |
| (GBA_VG1) Unique | | | |
| Similar | 1 | 0 | 2 |

[1366] The GC content of the first codon optimized sequence (SEQ ID NO: 1773) was compared to the second codon optimized sequence (SEQ ID NO: 1781) and the wild-type sequence (SEQ ID NO: 1777). For RNA accessibility and GC content, the wild type GC biodistribution pattern was maintained in the first codon optimized sequence of SEQ ID NO: 1773 of GBA_VG17 (FIG. 5). However, the second codon optimized sequence of SEQ ID NO: 1781 (GBA_VG1) had balanced GC content across the entire length of the nucleotide sequence (FIG. 5).

[1367] The percentage homology for SEQ ID NO: 1781 (GBA_VG1) and SEQ ID NO: 1773 (GBA_VG17) with respect to the wild type sequence (SEQ ID NO: 1777; GBA_VG21) is shown in Table 14. The first codon-optimized sequence of SEQ ID NO: 1773 in GBA_VG17 shares about 80.6% and about 80.0% sequence homology with respect to the wild type sequence of SEQ ID NO: 1777 in GBA_VG21, without and with the signal sequence, respectively. The second codon-optimized sequence (SEQ ID NO: 1781) in GBA_VG1 shares about 81.3% and about 80.7% sequence homology with respect to the wild type GBA sequence, without and with signal sequence, respectively. The first codon-optimized sequence of SEQ ID NO: 1773 in GBA_VG17 has about 87.0% and about 86.3% sequence homology with respect to the second codon optimized nucleotide sequence of SEQ ID NO: 1781, in GBA_VG1 without and with signal sequence, respectively. There were 131 unique mutations introduced into the first codon-optimized nucleotide sequence of SEQ ID NO: 1773 (GBA_VG17) relative to the wild type nucleotide sequence of SEQ ID NO: 1777 (GBA_VG21). The second codon-optimized nucleotide sequence of SEQ ID NO: 1781 (GBA_VG1) had 120 unique mutations relative to the wild type nucleotide sequence of SEQ ID NO: 1777 (GBA_VG21).

TABLE 14
GC Content and Percentage Homology of Codon
Optimized Sequences (SEQ ID NO: 1773 or 1781)
Relative to the Wild Type Sequence (SEQ ID NO: 1777)
% Homology to WT GBA

| | | | | | G/C |
|---|---|---|---|---|---|
| | Without | With | Splice | | content |
| | signal | Signal | site | Unique | (WT |
| cDNA Source | sequence | sequence | only | Mutations | 55%) |
| SEQ ID NO: | 80.6% | 80.0% | 4 bp | 131 | 59% |
| 1773 | | | mutation | | |
| (GBA_VG17) | | | | | |
| SEQ ID NO: | 81.3% | 80.7% | 5 bp | 120 | 58.5% |
| 1781 | | | mutation | | |
| (GBA_VG1) | | | | | |
| % SEQ ID | 87.0% | 86.3% | 3 bp | 190 | |
| NO: 1773 to | | | difference | (similar) | |
| SEQ ID NO: | | | | | |
| 1781 | | | | | |
| (GBA_VG17/ | | | | | |
| GBA_VG1) | | | | | |

### Example 14: Functional Comparison of Wild-Type and Codon-Optimized Sequences Encoding a GBA Protein

[1368] GBA expression and GCase activity of a GBA protein was compared for the vectorized viral genome constructs GBA_VG17 (SEQ ID NO: 1812) comprising a first codon optimized sequence (SEQ ID NO: 1773) encoding the GBA protein, GBA_VG1 (SEQ ID NO: 1759) comprising a second codon optimized sequence (SEQ ID NO: 1781) encoding the GBA protein, and GBA_VG21 (SEQ ID NO: 1816) comprising a wild-type GBA sequence (SEQ ID NO: 1777) encoding a GBA protein.

[1369] GD-II patient fibroblasts (GD-II GM00877) were treated at 10¹⁴. MOI of AAV2 vectors comprising the following constructs: GBA_VG17 (AAV2.GBA_VG17), GBA_VG1 (AAV2.GBA_VG1), or GBA_VG21 (AAV2.GBA_VG21), and GCase activity was quantified as RFU per mL and normalized to mg of total protein. As shown in FIG. 6A, AAV2.GBA_VG17 resulted in superior enzymatic GCase activity compared to AAV2.GBA_VG1 and AAV2.GBA_VG21 treated cells. GCase activity was 52.4 fold higher in AAV2.GBA_VG17 treated GD patient cells compared to a no AAV control; but only 30.8 fold and 32.9 fold higher in AAV2.GBA_VG21 and AAV2.GB_VG1 treated GD patient cells, respectively, compared to a no AAV control.

[1370] GD-II patient fibroblasts (GD-II GM00877) were then treated at an MOI of 10⁶ of AAV2 vectors comprising the following constructs: GBA_VG17 (AAV2.GBA_VG17), GBA_VG1 (AAV2.GBA_VG1), or GBA_VG21 (AAV2.GBA_VG21), and glucosylsphingosine levels (GlcSph in cell lysate (ng/mg Lamp1) and GBA substrate reduction activity was measured by LC-MS/MS. As shown in FIG. 6B, all constructs tested resulted in similar glucosylsphingosine levels and GBA substrate reduction, which were significantly reduced compared to the no AAV control. Expression of the encoded GBA protein by these GD patient cells treated with AAV2.GBA_VG17, AAV2.GBA_VG1, and AAV2.GBA_17 vectors was confirmed by Western blot.

[1371] Taken together, these data demonstrate higher GCase activity, stable GBA protein expression, and significant reduction of glucosylsphingosine levels with AAV2 vectorized GB_VG17 (SEQ ID NO: 1812), comprising the codon-optimized nucleotide sequence of SEQ ID NO: 1773 encoding the GBA protein compared to AAV2 vectorized GBA_VG1 and GBA_VG21.

### Example 15. Route of Administration and Production Platform Comparison Study

[1372] In this Example, HEK and Sf9-produced AAV9 vectors, for biodistribution and GBA expression in wild type rat brain were assessed. The vectors were administered to the animals either by a single route of administration by intra-cisterna magna (ICM) or intra-thalamic (ITH) delivery, or a dual route of administration, comprising a combination of ICM and ITH delivery.

[1373] AAV9 vectors packaged with GBA_VG1 (SEQ ID NO: 1759) (AAV9.GBA_VG1) produced in HEK and SF9 cells were injected into wild-type rat. For bilateral ITH administration, 7.5×10⁹ AAV9.GBA_VG1 viral genomes were injected into the thalamus of each hemisphere, resulting in a total dose of 1.5 10⁹ vector genomes. For ICM injection, 1.5×10¹⁰ AAV9.GBA_VG1 viral genomes were injected. For dual ITH and ICM administration, 1.5×10¹⁰ AAV9.GBA_VG1 viral genomes were injected for ICM delivery, and 7.5×10⁹ AAV9.GBA_VG1 viral genomes were injected into the thalamus of each hemisphere for bilateral ITH delivery, for a total dose of 3×10¹⁰ AAV9.GBA_VG1 viral genomes. Four weeks post-injection, the brains of the rats were assayed for bio-distribution of the viral genome and GCase activity in the central nervous system and peripheral tissues.

[1374] First, all animals throughout all treatment groups continued to gain weight consistently post operatively until time of euthanasia (4 week in life). Daily clinical observations showed normal healthy subjects. Therefore, at both selected doses of 1.5×10¹⁰ for single route of administration, and 3×10¹⁰ for combination route of administration, all animals tolerated the AAV treatments.

[1375] Viral genome distribution was also assessed at 28 days post intrathalamic dosing of HEK and Sf9 produced AAV9-GBA vectors in the wild-type rat brain, particularly in the thalamus, hippocampus striatum, and cortex. In the thalamus, hippocampus and striatum, there was a trend of higher average biodistribution with HEK-produced AAV9 vector compared to Sf9 (˜3-6 fold VG/cell increase). In the cortex, a similar average biodistribution profile was observed for HEK and Sf9 produced AAV9 vectors. These data show increased biodistribution with AAV9-GBA vectors produced by an HEK platform as compared to Sf9 following intrathalamic dosing in rats.

[1376] GCase activity was also compared at 28 days post intrathalamic dosing of HEK and Sf9 produced AAV9-GBA vectors in the wild-type rat brain. GCase activity was generally increased over baseline. However, the average increase in GCase activity was the greatest in the thalamus (site of injection) (70% over endogenous for Sf9 produced vectors and 20% over endogenous for HEK vectors, and in the thalamus, a moderate increase in average GCase activity was observed for HEK produced vectors relative to Sf9 produced vectors. Low to moderate increase was observed in forebrain and midbrain regions (cortex, striatum and hippocampus, ˜5-40% over endogenous).

[1377] Taken together, these data demonstrate that bilateral ITH AAV9.GBA_VG1 dosing resulted in successful distribution of AAV VGs in the CNS tissues and detectable overexpression of GBA (increased GCase activity over endogenous GCase activity) within a wild-type rat brain.

[1378] The effects of routes of administration on viral genome distribution and GCase activity of HEK produced AAV9.GBA_VG1 vectors were evaluated at day 28 post ICM, ITH, or dual ICM and ICM delivery of the vectors. A significantly higher viral genome distribution in ITH group was observed in deep-brain structures, including the thalamus and hippocampus, compared to ICM or dual ITH and ICM dosing. Similarly, higher viral genome distribution was observed in ITH group compared to ICM and dual ITH and ICM dosing. For cortex tissue, dual ITH and ICM dosing resulted in a significantly higher viral genome biodistribution compared to ITH and ICM dosing. Taken together, ITH delivery of AAV9-GBA vector displayed a higher viral genome (VG) biodistribution profile in the deep-midbrain structures (especially in the hippocampus and thalamus) as compared to ICM and dual ITH+ICM delivery. Further, ITH delivery appeared to drive the VG biodistribution profile in fore/mid brain observed with dual ITH+ICM injection.

[1379] For hindbrain tissues, a significantly higher cerebellar viral genome distribution was observed in ITH group compared to ICM or dual ITH and ICM dosing. Similarly, a trend of higher viral genome biodistribution was observed in brainstem for ITH group compared to ICM and dual ITH and ICM dosing. Therefore, similar to forebrain and midbrain structures, ITH delivery of AAV9-GBA_VG1 vector produced by HEK cells displayed a higher viral genome biodistribution profile in the hindbrain structure as compared to ICM and dual ITH and ICM delivery.

[1380] For forebrain and midbrain tissues with respect to GCase activity, the highest increase was observed at site of injection in thalamus (about 250% post ITH deliver followed by about 207% in dual ITH and ICM dosing). Moderate increase was observed post ITH delivery in cortex (about 123% compared to vehicle control, and about 141% after dual ITH and ICM dosing). For ICM dosing, minimal or no increase in GCase activity was observed in thalamus (about 110%) and cortex (about 91%) post ICM delivery. Combinatorial dosing (ICM and ITH) showed the highest GCase activity in cortex (about 141%). Overall, based on the viral genome distribution results and the GCase results, ITH dosing appears to be driving the increase in GCase activity in thalamus and cortex. Additionally, the AAV genome per cell biodistribution shows similar trend of GCase activity in the thalamus and cortex.

[1381] For hindbrain tissues, the highest increase was observed post ITH injection in cerebellum (about 178%), and a low increase was seen post both ICM and dual ICM and ITH delivery in cerebellum. Combinatorial dosing group did not show a higher increase in GCase activity readout within cerebellum. Overall, based on the viral genome distribution results and the GCase results, ITH dosing appears to be driving the increase in GCase activity in the cerebellum and the AAV genome per cell biodistribution shows similar trend of GCase activity in the cerebellum.

[1382] GCase activity was also evaluated in CSF fluid. Different levels of increase in CSF GCase activity were observed with different routes of administration. Specifically, the highest increase in GCase activity was observed in combinatorial dosing (ITH and ICM), followed by ITH delivery, and only moderate increase was observed by ICM delivery. These data demonstrated that AAV delivered GBA gene transfer in rats resulted in secretion of active GCase product in CSF.

[1383] This experiment demonstrated that intrathalamic injection and dual mode injection resulted in a more efficient delivery of AAV-GBA viral particles and a higher GCase expression/activity in the CNS tissues and the CSF.

### Example 16: In Vivo Evaluation of a Vectorized Viral Genome Comprising a Codon Optimized Nucleotide Sequence Encoding GBA

[1384] This Example investigates the distribution and efficacy of the viral genome construct GB_VG17 (SEQ ID NO: 1812) comprising a codon-optimized nucleotide sequence (SEQ ID NO: 1773) encoding a GBA protein, vectorized in a VOY101 capsid (VOY101.GBA_VG17) in wild-type C57BL/6 mice. VOY101 is a capsid protein that enables blood brain barrier penetration after IV injection.

[1385] Mice were intravenously injected with 2e13 VG/kg of VOY101.GBA_VG17 or a vehicle control, into the lateral tail vein. At 28-days post IV injection, various CNS tissues (e.g., cortex, striatum, hippocampus, thalamus, cerebellum, brainstem, and/or spinal cord) and peripheral tissues (e.g., heart, liver, and/or spleen) were harvested to measure viral genome (VG) biodistribution (VG/cell), GCase activity, and GBA mRNA expression (transgene specific and endogenous). All animals treated remained healthy and there was no significant difference in the body weight between mice treated with VOY101.GBA_VG17 and mice treated with the vehicle control.

[1386] With respect to VG biodistribution, high levels (approximately >50 vg/cell) of VOY101.GBA_VG17 distribution was observed across the forebrain and midbrain. In the cortex, 81.31 VG/cell were quantified on average (range: ˜75-85 vg/cell); in the striatum, 150.39 VG/cell were quantified on average (range: ˜90-330 vg/cell); in the hippocampus, 152.91 VG/cell were quantified on average (range: ˜70-195 vg/cell); and in the thalamus, 117.94 VG/cell were quantified on average (range: ˜70-190 vg/cell). Therefore, successful VOY101.GBA_VG17 gene transfer was achieved across the forebrain and midbrain regions.

[1387] Similarly, high levels (approximately >50 vg/cell) of VOY101.GBA_VG17 distribution was observed across the hind brain and spinal cord (cervical region). In the cerebellum, 65.77 VG/cell were quantified on average (range: ˜23-105 vg/cell); in the brainstem, 159.22 VG/cell were quantified on average (range: ˜110-305 vg/cell); and in the spinal cord, 176.29 VG/cell were quantified on average (range: ˜95-280 vg/cell). Therefore, successful VOY101.GBA_VG17 gene transfer was also achieved across the hindbrain and spinal cord.

[1388] With respect to VG biodistribution in peripheral tissues, detectable levels of VOY101.GBA_VG17 were observed in the heart, spleen, and liver, but this was approximately 4-10 fold lower than the levels observed in the CNS tissues. In the heart, 11.58 VG/cell were quantified on average (range: ˜5-21 vg/cell); in the spleen, 29.99 VG/cell were quantified on average (range: ˜7-82 vg/cell); and in the liver, 18.76 VG/cell were quantified on average (range: ˜5-60 vg/cell).

[1389] With respect to GCase activity (measured as RFU/mL normalized to mg of protein), the forebrain and midbrain following IV injection of VOY101.GBA_VG17 demonstrated a significant increase in GCase activity over baseline (vehicle control). The highest increase was observed in the cortex (4.86 fold higher than the vehicle control). A similar increase was observed in the striatum (4.6 fold higher than the vehicle control) and the thalamus (4.74 fold higher than the vehicle control). Therefore, a significant increase in GCase activity was observed in the forebrain and midbrain which had high VOY101.GBA_VG17 biodistribution. Similarly, the hindbrain structures following IV injection of VOY101.GBA_VG17 demonstrated a significant increase in GCase activity over baseline (vehicle control). The cerebelum showed a 4.04 fold higher GCase activity than the vehicle control and the brainstem showed a 5.26 fold higher GCase activity than the vehicle control. Therefore, a significant increase in GCase activity was also observed in the hind brain which had high VOY101.GBA_VG17 biodistribution. Overall, all brain regions tested showed a 4-5 fold increase in GCase activity relative to the vehicle control and IV delivery of VOY101.GBA_VG17 resulted in a successful and uniform increase in GCase activity across pertinent CNS tissues.

[1390] GCase activity was also measured in the liver (as RFU/mL normalized to mg of protein) following IV injection of VOY101.GBA_VG17. The liver showed a 4.12 fold increase in GCase activity relative to the vehicle control, demonstrating a successful increase in GBA activity in a non-CNS tissue.

[1391] In additional to the cellular and tissue GCase activity levels quantified in both the CNS and the liver, GCase activity was also measured in the fluid of the mice, including in the cerebral spinal fluid (CSF) and the serum, post-IV injection of VOY101.GBA_VG17. GCase activity was higher in the serum as compared to the CSF. A 5.9 fold increase in GCase activity relative to the vehicle treated control was observed in the CSF and a 22.3 fold increase in GCase activity relative to the vehicle treated control was observed in the serum. These data demonstrate active GCase is secreted into extracellular compartments following IV injection of VOY101.GBA_VG17.

[1392] The GCase activity levels quantified and the fold increase in activity relative to the vehicle in the CNS and peripheral tissues and fluid measured following IV injection of VOY101.GBA_VG17 are summarized in Table 27.

TABLE 27
Summary of GCase activity levels (RFU/per
mL) normalized to mg of protein

| GCase Activity (RFU/per mL) | | Fold Increase in GCase activity |
|---|---|---|
| normalized to mg of protein | | relative to no vehicle control |
| Cortex | Vehicle | |
| 62246 | 12789 | 4.86 |
| Striatum | Vehicle | |
| 32063 | 6898 | 4.64 |
| Thalamus | Vehicle | |
| 40506 | 9061 | 4.74 |
| Cerebellum | Vehicle | |
| 36082 | 8926 | 4.04 |
| Brainstem | Vehicle | |
| 44706 | 8495 | 5.26 |
| Liver | Vehicle | |
| 100123 | 24272 | 4.1 |
| CSF | Vehicle | |
| 3707 | 627 | 5.9 |
| Serum | Vehicle | |
| 6919 | 310 | 22.3 |

[1393] Both endogenous and transgene specific GBA mRNA (payload) expression was quantified post-IV injection of VOY101.GBA_VG17 in the cortex, thalamus, and brainstem. GBA mRNA was quantified as GBA mRNA expression per 1,000 transcripts normalized to geomean (GAPDH, HPRT1, PPIA). With respect to endogenous GBA mRNA, approximately 38-63 copies per 1000 transcripts were measured across the brain. More specifically, in the cortex, thalamus, and brainstem, 63.10 endogenous GBA mRNA/1,000 transcripts, 38.81 endogenous GBA mRNA/1,000 transcripts, and 38.95 endogenous GBA mRNA/1,000 transcripts were quantified, respectively. With respect transgene specific GBA mRNA, approximately 1314-1765 copies per 1000 transcripts were measured across the brain. In the cortex, thalamus, and brainstem, 1314.39 transgene specific GBA mRNA/1,000 transcripts, 1547.21 transgene specific GBA mRNA/1,000 transcripts, and 1764.02 transgene specific GBA mRNA/1,000 transcripts were quantified, respectively. Accordingly, in the cortex, thalamus, and brain stem, there was an 874 fold, 1032 fold, and 1244 fold increase in transcript specific GBA mRNA compared to the vehicle control, respectively. Therefore, successful transcription of the transgene comprising the codon-optimized nucleotide sequence (SEQ ID NO: 1773) encoding the GBA protein was achieved in the brain at 28-days post IV injection of a blood brain barrier penetrant VOY101.GBA_VG17 vector. Endogenous GBA mRNA levels in the brain maintained similar levels in the tissues treated with VOY101. GBA_VG17 and the tissues treated with the vehicle control. These data demonstrate successful transgene transcription and expression of a GBA payload in the CNS following IV injection of VOY101.GBA_VG17.

[1394] Both endogenous and transgene specific GBA mRNA expression was also quantified post-IV injection of VOY101.GBA_VG17 in the liver. In the liver, 182.29 endogenous GBA mRNA/1,000 transcripts were quantified (range: ˜188-240 per 1000 transcripts), and there was no significant difference in the endogenous GBA mRNA levels between treated and untreated mice. Approximately, 1372.45 transgene specific GBA mRNA/1,000 transcripts were quantified in the liver, and a 739 fold increase in GBA mRNA was observed in the treated mice compared to the vehicle control. These data demonstrate successful transgene transcription and expression of a GBA payload in the liver following IV injection of VOY101.GBA_VG17.

[1395] The relationship between biodistribution (VG/cell) and GCase activity (RFU/mL, fold over endogenous GCase activity, normalized to mg of protein) following IV injection of VOY101.GBA_VG17 was also evaluated in the cortex, striatum, thalamus, brainstem, cerebellum, and liver of the mice. In the CNS tissues, approximately a 300-660% fold increase in GCase activity over endogenous GCase activity was observed (FIG. 8) and 595-1825 transgene-specific GBA mRNA copies/1000 transcripts were quantified. In the liver, while there was intra-group variability, a 180-850% fold increase in GCase activity relative to endogenous GCase activity was measured, with approximately 330-2450 transgene specific GBA mRNA copies per 1000 transcripts quantified. The GCase levels quantified in the liver were comparable to the CNS tissues at lower VG/cell levels (FIG. 8). It is predicted that a 30-50% fold increase in GCase activity over endogenous is clinically impactful. Therefore, intravenous injection of VOY101.GBA_VG17 was able to increase the levels of GCase activity in various CNS and peripheral tissues relative to endogenous, well above the predicted fold increase thought to be clinically impactful.

[1396] Some of these data discussed above are summarized in Table 22 below. In summary, VOY101.GBA_VG17 which comprises the codon-optimized nucleotide sequence of SEQ ID NO: 1773 encoding the GBA protein demonstrated high biodistribution in the CNS, increased GCase activity in the CNS and peripheral tissues and fluid, and successful transgene transcription and expression. GBA_VG17 could therefore be used in the treatment of disorders associated with a lack of a GBA protein and/or GCase activity, such as neuronopathic (affects the CNS) and non-neuronopathic (affects non-CNS) Gaucher's disease, PD associated with a mutation in the GBA gene, and dementia with Lewy Bodies.

TABLE 22
Summary of VG biodistribution, GCase activity, and GBA mRNA
data 28 day post IV injection of VOY101.GBA_VG17 at
2e13 vg/kg in the cortex, thalamus, brain stem and liver

| | | GBA mRNA | GBA mRNA | GCase expression |
|---|---|---|---|---|
| | | (over | (over | (over |
| | | endogenous | vehicle | vehicle |
| Region | VG/Cell | GBA) | baseline) | baseline) |
| Cortex | 83.31 | 20.83 | 874 | 4.86 |
| Thalamus | 117.94 | 39.87 | 1032 | 4.74 |
| Brain Stem | 159.22 | 45.29 | 1244 | 5.26 |
| Liver | 18.76 | 7.29 | 739 | 4.12 |

### Example 17. De-Targeting GBA Expression in the Dorsal Root Ganglia (DRG)

[1397] This Example demonstrates the use of a miR183 binding site to reduce GBA expression in the dorsal root ganglion (DRG) neurons, which express the corresponding endogenous microRNA, miR183.

[1398] A viral genome construct, GBA_VG33 (SEQ ID NO: 1828, described in Tables 18-19 and 21), comprising a codon-optimized nucleotide sequence (SEQ ID NO: 1773) encoding a GBA protein and a miR183 binding site series (SEQ ID NO: 1849), comprising four miR183 binding sites (each comprising SEQ ID NO: 1847), each separated by an 8 nucleotide spacer (GATAGTTA). The GBA_VG33 were also vectorized into an AAV2 vector (AAV2.GBA_VG33).

[1399] HEK293 cells were transfected with the GBA_VG33 construct and GBA protein expression was compared to cells transfected with the GB_VG17 control construct (SEQ ID NO: 1812) which comprises a codon-optimized nucleotide sequence (SEQ ID NO: 1773) encoding a GBA protein but does not comprise a miR183 binding site series. Similar GBA protein expression levels were observed following transfection with the GBA_VG33 construct and the GBA_VG17 control construct. HEK293 cells were also co-transfected with either the GBA_VG33 construct comprising the miR183 binding site series, or the GBA_VG17 control construct, and miR183, and GBA protein expression was measured. A significant reduction of GBA expression was observed in HEK293 cells co-transfected the GBA_VG33 construct and miR183 compared to those cells co-transfected with the GBA_VG17 control and miR183. These data demonstrated that the GBA_VG33 construct comprising the miR183 binding site series was able to reduce GBA expression in the presence of the corresponding microRNA (miR183).

[1400] De-targeting of GBA expression in the DRG was also investigated in rat embryonic DRG neurons. The rat embryonic DRG neurons were transduced with AAV2.GBA_VG33 (comprises the miR183 binding site series) or AAV2.GBA_VG17 control at an MOI of 10^{3.5} or 10^{4.5}, or a no AAV control. GCase activity was measured as RFU/mL per mg of total protein. As shown in FIG. 7, GCase activity was significantly reduced in the rat embryonic DRG neurons transduced with AAV2.GBA_VG33 compared to those transfected with AAV2.GBA_VG17, at both MOIs tested. Also, the levels of GCase activity measured in the rat embryonic DRG neurons transduced with AAV2.GBA_VG33 at both MOIs was similar to the level of GCase measured in the no AAV control.

[1401] Taken together, these data demonstrate that successful GBA expression de-targeting in the DRG was achieved with the GBA_VG33 (SEQ ID NO: 1828), comprising a codon-optimized nucleotide sequence (SEQ ID NO: 1773) encoding the GBA protein and the miR183 binding site series (SEQ ID NO: 1849).

### Example 18. NHP High-Throughout Screen of TRACER AAV Libraries

[1402] A TRACER based method as described in WO2020072683, the contents of which are herein incorporated by reference in their entirety, was adapted for use in non-human primates (NHP), as described in WO 2021/202651 and WO2021230987, the contents of which are herein incorporated by reference in their entirety. An orthogonal evolution approach was combined with a high throughput screening by NGS in NHP as described in WO 2021/202651 and WO2021230987, the contents of which are herein incorporated by reference in their entirety. Briefly, AAV9/AAV5 starting libraries, driven by synapsin or GFAP promoters were administered to non-human primate (NHP) intravenously for in vivo AAV selection (biopanning), performed iteratively. All libraries were injected intravenously at a dose of 1e14VG per animal (approximately 3e13 VG/kg). Orthogonally, biopanning was conducted in hBMVEC cells using the same starting libraries. In the second round of biopanning in NHP, only libraries driven by the synapsin promoter were used. After a period, (e.g., 1 month) RNA was extracted from nervous tissue, e.g., brain and spinal cord. Following RNA recovery and RT-PCR amplification, a systematic NGS enrichment analysis was performed, and the peptides shown in Table 2 and 34 identified. Capsid enrichment ratio, including calculating the ratio of, e. g., P2/P1 reads and comparison to a benchmark (e.g., AAV9) was evaluated.

[1403] Candidate library enrichment data in P3 NHP brain for the peptides identified, over benchmark AAV9, are shown in Table 34. Data are provided as fold enrichment. Fifty-one variants showed greater than 10-fold enrichment over AAV9. Variants with 0.0 enrichment over AAV9 are not included in Table 34.

TABLE 34
NHP NGS AAV9 Enrichment

| | | Fold | | Fold | |
|---|---|---|---|---|---|
| | SEQ | enrich- | | enrich- | SEQ |
| Peptide | ID | ment | Peptide | ment | ID |
| Sequence | NO | over AAV9 | Sequence | over AAV9 | NO |
| PLNGAVHLYA | 5602 | 473.7 | AQAGEQSTRL | 16.1 | 5629 |
| AQARDSPKGW | 5603 | 214 | AQASNDVGRA | 15.4 | 5630 |
| LTNGAVRDRP | 5604 | 134.4 | AQATFTASEY | 15.3 | 5631 |
| VQAFTHDSRG | 5605 | 88.6 | AKAHAGTIYS | 14.9 | 5632 |
| AQAYSTDVRM | 5606 | 84.8 | AQARTIDQCC | 14.8 | 5633 |
| AQAYSTDVRI | 5607 | 83.8 | AQEYNSNPKA | 14.5 | 5634 |
| AQAFTAAERM | 5608 | 74.9 | AQVVDNSTHA | 14.5 | 5635 |
| AQTHLQIGVA | 5609 | 54.6 | AQATLSVPLK | 14.4 | 5636 |
| AQSNAVLSLA | 5610 | 51.6 | AQIVMNSLKA | 12.5 | 5637 |
| AQAYSTDERM | 5611 | 41.4 | AQATMSQTMA | 12.5 | 5638 |
| AQAYSTDVRL | 5612 | 31.7 | AQALTQDERW | 12 | 5639 |
| AQATVSTLRM | 5613 | 31.5 | AQAQLSTLRP | 11.6 | 5640 |
| AQAYSTDERK | 5614 | 31.2 | AQVVMGISVA | 11.4 | 5641 |
| AQAYSTDMRM | 5615 | 30.4 | AQAYTTDVRM | 11.4 | 5642 |
| VVNGAVLHVA | 5616 | 29.8 | AQHIDSMRPP | 11.3 | 5643 |
| AQAYSTDVTM | 5617 | 29.7 | AQASTGTLRL | 11.1 | 5644 |
| AQAHLQIGVA | 5618 | 23 | AQHRALDYYA | 11 | 5645 |
| FLDPAVSSKA | 5619 | 22.6 | AQARESPRGL | 10.9 | 5646 |
| AQAYVSTLRM | 5620 | 21.9 | AQALLAGTRV | 10.7 | 5647 |
| AQAQTGPPLK | 5621 | 20.1 | TKIQAVPWNA | 10.7 | 5648 |
| EQASRLPTPG | 5622 | 20 | AQASLSSTRP | 10.6 | 5649 |
| AQASVSTMRM | 5623 | 19.7 | AQAMGSRSDQ | 10.4 | 5650 |
| TDYSAVRLGA | 5624 | 18 | AQAAQGTYRG | 10.3 | 5651 |
| TQAYSTDVRM | 5625 | 17.9 | SQENAVFSKA | 10.3 | 5652 |
| AQALPSNERL | 5626 | 17.4 | AQAYGLPKGP | 8.4 | 5653 |
| AQAYSTDVRT | 5627 | 16.4 | GGTLAVVSLA | 6.9 | 5654 |
| AQSSLPEMVA | 5628 | 16.2 | AQAYVSSVKM | 5.2 | 5655 |

[1404] A subset of the peptide variants from the NHP biopanning showed a very strong and consistent enrichment over AAV9 and PHP.B controls. Further, the peptide of SEQ ID NO: 5602 not only showed a strong enrichment over AAV9 in the brain, but also in the spinal cord, as it led to a 125.6 fold enrichment over AAV9 in the spinal cord. Following the removal of the least reliable variants, a set of 22 variants with enrichment factors ranging from 7-fold to >400-fold over AAV9 was identified. These were cross-referenced to a non-synthetic PCR-amplified library screened in parallel and 12 candidates showed reliable enrichment and high consistency in both assays. Of these, 5 candidates with the highest enrichment scores in both assays and the highest consistency across animals and tissues were retained for individual evaluation. Candidate capsids were labeled TTD-001, TTD-002, TTD-003, TTD-004 and TTD-005 as shown in Table 37 above.

[1405] After 3 rounds of screening of AAV9 peptide insertion library in NHP, many capsids outperformed their parental capsid AAV9 in penetration of the blood brain barrier (BBB). Some of the capsids comprising a peptide showed high enrichment scores and high consistency both across different brain tissue samples from the same animal and across different animals. Consistency in both NNK and NNM codons was also observed. 22 capsid variants exhibited enrichment factors ranging from 7-fold to >400-fold over AAV9 in the brain tissues. A majority of these variants also demonstrated high enrichment factors up to 125-fold over AAV9 in the spinal cord. Of these, 5 candidates with diverse inserted sequences were selected for further evaluation as individual capsids.

### Example 19. Individual Capsid Characterization

[1406] The goal of these experiments was to determine the transduction level and the spatial distribution of each of the 5 capsid candidates selected from the study described in Example 18 relative to AAV9 following intravascular infusion in NHPs (cynomolgus macaque). The 5 selected capsid candidates were TTD-001 (SEQ ID NO: 3623 and 3636, comprising SEQ ID NO: 3648), TTD-002 (SEQ ID NO: 3624, 3625, and 3637, comprising SEQ ID NO: 3649), TTD-003 (SEQ ID NO: 3626 and 3638, comprising SEQ ID NO: 3650), TTD-004 (SEQ ID NO: 3627 and 3639, comprising SEQ ID NO: 3651) and TTD-005 (SEQ ID NO: 3628 and 3640, comprising SEQ ID NO: 3652) as outlined in Table 37 above.

[1407] AAV particles were generated with each of these 5 capsids encapsulating a transgene encoding a payload fused to an HA tag (payload-HA) and driven by a full-length CMV/chicken beta actin promoter by triple transfection in HEK293T cells and formulated in a pharmaceutically acceptable solution. Each test capsid and AAV9 control were tested by intravenously providing two (2) NHP females the AAV particle formulation at a dose of 2e13 VG/kg. The in-life period was 14 days and then a battery of CNS and peripheral tissues were collected for quantification of transgene mRNA, transgene protein and viral DNA (biodistribution). Samples were also collected, fixed and paraffin embedded for immunohistochemical stainings.

[1408] In a first pass screening of RNA quantification by qRT-PCR and RT-ddPCR, total RNA was extracted from 3-mm punches from various areas of the brain (cortex, striatum, hippocampus, cerebellum), spinal cord sections, liver and heart, and analyzed by qRT-PCR using a proprietary Taqman set specific for the synthetic CAG exon-exon junction. Cynomolgus TBP (TATA box-binding protein) was used as a housekeeping gene.

[1409] TRACER capsids showed an increase in RNA expression in all brain regions relative to AAV9 in at least one animal. The highest and most consistent increase in brain transduction was observed with capsids TTD-003 and TTD-004 (8- to 200-fold depending in various anatomical locations). In this initial screening TTD-001 was not assessed due to staggered animal dosing. An approximate 10- to 12-fold increase was consistently observed in whole brain slices (equivalent to an average of multiple regions), which was consistent with the values indicated in a next-generation sequencing (NGS) assay. In order to increase data robustness, droplet digital RT-PCR (ddPCR) was performed in parallel to qRT-PCR and confirmed the trends indicated by the qPCR data.

[1410] Interestingly, RNA quantification performed in the spinal cord and dorsal root ganglia indicated important differences between the capsid variants. The spinal cord transduction profile was consistent with the brain, with a strong and consistent increase with TTD-003 and TTD-004 capsids, but interestingly the DRG transduction suggested a substantial detargeting of the TTD-004 capsid, whereas the TTD-003 capsid showed a strongly increased RNA expression.

[1411] Total DNA was extracted from the same brain tissues as RNA, and biodistribution was measured by ddPCR using a Taqman set specific for the CMV promoter sequence. The RNAseP gene was used as a copy number reference. Vector genome (VG) per cell values were determined both by qPCR and ddPCR. Increased biodistribution was observed for the TTD-004 capsid in most brain regions, but surprisingly none of the other candidates showed a significant increase by comparison with AAV9. This apparent contradiction with the RNA quantification data could suggest that some capsids may present improved properties over AAV9 in post-attachment mechanisms rather than strict vector translocation in CNS parenchyma. Interestingly, DNA analysis confirmed the substantial detargeting of TTD-004 capsid from the DRG.

[1412] To further explore the behavior of capsid variant TTD-004, viral genome (VG) quantification was completed from tissues collected from heart atrium, heart ventricle, quadriceps muscle, liver (left and right) and diaphragm and compared to vector genome presence as delivered by AAV9 in the same tissues.

[1413] For TD-003 and TTD-004 initial immunohistochemical analyses demonstrated the presence of payload-HA to a greater extent than seen with AAV9 delivery in cerebellar tissue, including in the dentate nucleus. Immunohistochemistry confirmed the de-targeting of the dorsal root ganglia for capsid variant TTD-004 as compared to TTD-003 and AAV9.

[1414] Data for each of the variants as described above were compiled as an average mRNA (fold PGP-70n.M over TBP) or DNA (VG per cell) quantification per capsid variant per tissue as shown in Table 35 below.

TABLE 35
Characterization of exemplary capsid variants

| Measure | Tissue | AAV9 | TTD-001 | TTD-002 | TTD-003 | TTD-004 | TTD-005 |
|---|---|---|---|---|---|---|---|
| mRNA | Frontal | 0.000325065 | 2.7232575 | 0.000768179 | 0.006268831 | 0.007076252 | 0.002204024 |
| | Cortex | | | | | | |
| mRNA | Sensory | 0.001486245 | 3.400055 | 0.00417739 | 0.006788644 | 0.010976612 | 0.004139604 |
| | Cortex | | | | | | |
| mRNA | Motor Cortex | 0.00063318 | 9.00819 | 0.001050247 | 0.009954825 | 0.010522399 | 0.002942249 |
| mRNA | Putamen | 0.000612759 | 3.557205 | 0.001395549 | 0.011832671 | 0.011476176 | 0.001150153 |
| mRNA | Thalamus | 0.002610992 | 2.863635 | 0.013937891 | 0.101411445 | 0.07565653 | 0.01100289 |
| mRNA | Cerebellar | 0.00133497 | 1.3439 | 0.008517779 | 0.006396677 | 0.012964181 | 0.004382119 |
| | Cortex | | | | | | |
| mRNA | Dentate | 0.001364954 | 0.963955 | — | — | — | — |
| | Nucleus | | | | | | |
| mRNA | Caudate | 0.000352281 | 1.3026 | — | 0.003259804 | 0.00634117 | — |
| mRNA | Hippocampus | 0.000311824 | 0.407015 | — | — | — | — |
| mRNA | SC-cervical | 0.012205449 | 11.877762 | 0.022004264 | 0.026994764 | 0.088316491 | 0.005773054 |
| mRNA | SC-Thoracic | 0.048833465 | 2.9974295 | 0.004360318 | 0.035118928 | 0.020543776 | 0.005629959 |
| mRNA | SC-Lumbar | 0.029887407 | 7.969603 | 0.056231995 | 0.016033388 | 0.047713563 | 0.026324154 |
| mRNA | DRG- | 0.74570895 | 9.274951 | 0.007897714 | 2.47872652 | 0.280868887 | 0.008122233 |
| | cervical | | | | | | |
| mRNA | DRG- | 0.5559061 | 5.22606 | 0.006456564 | 8.721845271 | 0.104701895 | — |
| | Thoracic | | | | | | |
| mRNA | DRG- | 1.089758 | 17.308436 | 0.008247771 | 2.271300217 | 0.426704698 | 0.119974244 |
| | Lumbar | | | | | | |
| mRNA | Lung | 0.004807149 | 0.000546842 | — | — | 0.013744781 | — |
| mRNA | Pancreas | — | — | — | — | — | — |
| mRNA | Colon | 0.017962678 | 0.005041385 | — | — | 0.183862903 | — |
| mRNA | Kidney | 0.043825993 | 0.006649157 | — | — | 0.041234576 | — |
| mRNA | Liver | 0.674478605 | 0.253188648 | — | — | 2.578654807 | — |
| mRNA | Adrenal | — | — | — | — | — | — |
| mRNA | Spleen | 0.014066875 | 0.000955981 | — | — | 0.013435626 | — |
| mRNA | Heart | 1.323389668 | 0.132477314 | — | — | 5.587929805 | — |
| mRNA | Quadriceps | 0.116623509 | — | — | — | 4.527799743 | — |
| mRNA | Diaphragm | 0.250001109 | — | — | — | 1.936435215 | — |
| DNA | Frontal | 0.07713 | 2.104843 | 0.10252 | 0.068367 | 0.380429 | 0.1257545 |
| | Cortex | | | | | | |
| DNA | Sensory | 0.093003 | 2.679886 | 0.07443 | 0.034016 | 0.2670975 | 0.132503 |
| | Cortex | | | | | | |
| DNA | Motor Cortex | 0.08796 | 4.3437625 | 0.0913085 | 0.094401 | 0.318999 | 0.1110695 |
| DNA | Putamen | 0.0581365 | 3.07904 | 0.12326 | 0.1497635 | 0.2731175 | 0.0715295 |
| DNA | Thalamus | 0.0524055 | 2.076863 | 0.0664225 | 0.090511 | 0.214999 | 0.086863 |
| DNA | Cerebellar | 0.014238 | 0.186361 | 0.0092915 | 0.009578 | 0.0356345 | 0.0128655 |
| | Cortex | | | | | | |
| DNA | Dentate | 0.025042 | 0.1861975 | 0.210238 | 0.041906 | 0.106107 | 0.055287 |
| | Nucleus | | | | | | |
| DNA | Caudate | 0.079294 | 3.9433175 | — | 0.0529005 | 0.2451035 | — |
| DNA | Hippocampus | 0.095436 | 1.760891 | 0.205433 | 0.368645 | 1.335324 | 0.432829 |
| DNA | SC-cervical | 0.0376 | 1.143863 | 0.061085 | 0.061535 | 0.07573 | 0.05885 |
| DNA | SC-Thoracic | 0.02692 | 0.933734 | 0.025955 | 0.05011 | 0.064915 | 0.0355 |
| DNA | SC-Lumbar | 0.03615 | 0.992728 | 0.019125 | 0.034175 | 0.085165 | 0.051475 |
| DNA | DRG- | 0.0765 | 0.14319 | 0.08196 | 0.13722 | 0.04115 | 0.071625 |
| | cervical | | | | | | |
| DNA | DRG- | 0.165865 | 0.172363 | 0.07202 | 0.133455 | 0.04444 | 0.03139 |
| | Thoracic | | | | | | |
| DNA | DRG- | 0.218725 | 0.385712 | 0.146115 | 0.153205 | 0.032875 | 0.12034 |
| | Lumbar | | | | | | |
| DNA | Lung | 1.085639916 | 3.72 | 0.958576278 | 0.700015423 | 1.22442329 | 0.919823152 |
| DNA | Pancreas | 0.256670617 | 20.535 | 0.320558325 | 0.240633195 | 0.067860607 | 0.004802583 |
| DNA | Colon | 0.053867646 | 3.405 | 1.179065405 | 0.348969617 | 0.116867365 | 0.015288464 |
| DNA | Kidney | 0.896656371 | 26.635 | 4.861362029 | 0.532746958 | 0.386522209 | 7.973793288 |
| DNA | Liver | 207.332334 | 217.64 | 111.910319 | 193.8349405 | 448.5980021 | 213.0317219 |
| DNA | Adrenal | 1.647725996 | 0.69 | 1.561129869 | 1.871878 | 1.269473156 | 0.847293047 |
| DNA | Spleen | 14.93815481 | 20.43565 | 51.70294001 | 22.79095714 | 6.514778227 | 45.91987284 |
| DNA | Heart | 2.012377817 | 14.49 | 0.757528914 | 1.780956673 | 3.814571986 | 0.44694144 |
| DNA | Quadriceps | 0.724278943 | 1.285 | 0.476250457 | 1.366015493 | 5.611203726 | 0.646197937 |
| DNA | Diaphragm | — | 1.06 | — | — | — | — |

[1415] When calculated as fold over AAV9 the data were as shown in Table 36 below.

TABLE 36
Characterization of exemplary capsid variants

| Measure | Tissue | AAV9 | TTD-001 | TTD-002 | TTD-003 | TTD-004 | TTD-005 |
|---|---|---|---|---|---|---|---|
| mRNA | Frontal Cortex | 1.0 | 8378 | 2.4 | 19.3 | 21.8 | 6.8 |
| mRNA | Sensory Cortex | 1.0 | 2288 | 2.8 | 4.6 | 7.4 | 2.8 |
| mRNA | Motor Cortex | 1.0 | 14227 | 1.7 | 15.7 | 16.6 | 4.6 |
| mRNA | Putamen | 1.0 | 5805 | 2.3 | 19.3 | 18.7 | 1.9 |
| mRNA | Thalamus | 1.0 | 1097 | 5.3 | 38.8 | 29.0 | 4.2 |
| mRNA | Cerebellar | 1.0 | 1007 | 6.4 | 4.8 | 9.7 | 3.3 |
| | Cortex | | | | | | |
| mRNA | Dentate | 1.0 | 706 | — | — | — | — |
| | Nucleus | | | | | | |
| mRNA | Caudate | 1.0 | 3698 | — | — | — | — |
| mRNA | Hippocampus | 1.0 | 1305 | — | — | — | — |
| mRNA | SC-cervical | 1.0 | 973 | 1.8 | 2.2 | 7.2 | 0.5 |
| mRNA | SC-Thoracic | 1.0 | 61 | 0.1 | 0.7 | 0.4 | 0.1 |
| mRNA | SC-Lumbar | 1.0 | 267 | 1.9 | 0.5 | 1.6 | 0.9 |
| mRNA | DRG-cervical | 1.0 | 12 | 0.0 | 3.3 | 0.4 | 0.0 |
| mRNA | DRG-Thoracic | 1.0 | 9 | 0.0 | 15.7 | 0.2 | — |
| mRNA | DRG-Lumbar | 1.0 | 16 | 0.0 | 2.1 | 0.4 | 0.1 |
| mRNA | Lung | 1.0 | 0.11 | — | — | 2.9 | — |
| mRNA | Pancreas | — | — | — | — | — | — |
| mRNA | Colon | 1.0 | 0.28 | — | — | 10.2 | — |
| mRNA | Kidney | 1.0 | 0.15 | — | — | 0.9 | — |
| mRNA | Liver | 1.0 | 0.38 | — | — | 3.8 | — |
| mRNA | Adrenal | — | — | — | — | — | — |
| mRNA | Spleen | 1.0 | 0.07 | — | — | 1.0 | — |
| mRNA | Heart | 1.0 | 0.10 | — | — | 4.2 | — |
| mRNA | Quadriceps | 1.0 | — | — | — | 38.8 | — |
| mRNA | Diaphragm | 1.0 | — | — | — | 7.7 | — |
| DNA | Frontal Cortex | 1.0 | 27.29 | 1.3 | 0.9 | 4.9 | 1.6 |
| DNA | Sensory Cortex | 1.0 | 28.82 | 0.8 | 0.4 | 2.9 | 1.4 |
| DNA | Motor Cortex | 1.0 | 49.38 | 1.0 | 1.1 | 3.6 | 1.3 |
| DNA | Putamen | 1.0 | 52.96 | 2.1 | 2.6 | 4.7 | 1.2 |
| DNA | Thalamus | 1.0 | 39.63 | 1.3 | 1.7 | 4.1 | 1.7 |
| DNA | Cerebellar | 1.0 | 13.09 | 0.7 | 0.7 | 2.5 | 0.9 |
| | Cortex | | | | | | |
| DNA | Dentate | 1.0 | 7.44 | 8.4 | 1.7 | 4.2 | 2.2 |
| | Nucleus | | | | | | |
| DNA | Caudate | 1.0 | 49.73 | — | 0.7 | 3.1 | — |
| DNA | Hippocampus | 1.0 | 18.45 | 2.2 | 3.9 | 14.0 | 4.5 |
| DNA | SC-cervical | 1.0 | 30.42 | 1.6 | 1.6 | 2.0 | 1.6 |
| DNA | SC-Thoracic | 1.0 | 34.69 | 1.0 | 1.9 | 2.4 | 1.3 |
| DNA | SC-Lumbar | 1.0 | 27.46 | 0.5 | 0.9 | 2.4 | 1.4 |
| DNA | DRG-cervical | 1.0 | 1.87 | 1.1 | 1.8 | 0.5 | 0.9 |
| DNA | DRG-Thoracic | 1.0 | 1.04 | 0.4 | 0.8 | 0.3 | 0.2 |
| DNA | DRG-Lumbar | 1.0 | 1.76 | 0.7 | 0.7 | 0.2 | 0.6 |
| DNA | Lung | 1.0 | 3.43 | 0.9 | 0.6 | 1.1 | 0.8 |
| DNA | Pancreas | 1.0 | 80.01 | 1.2 | 0.9 | 0.3 | 0.0 |
| DNA | Colon | 1.0 | 63.21 | 21.9 | 6.5 | 2.2 | 0.3 |
| DNA | Kidney | 1.0 | 29.70 | 5.4 | 0.6 | 0.4 | 8.9 |
| DNA | Liver | 1.0 | 1.05 | 0.5 | 0.9 | 2.2 | 1.0 |
| DNA | Adrenal | 1.0 | 0.42 | 0.9 | 1.1 | 0.8 | 0.5 |
| DNA | Spleen | 1.0 | 1.37 | 3.5 | 1.5 | 0.4 | 3.1 |
| DNA | Heart | 1.0 | 7.20 | 0.4 | 0.9 | 1.9 | 0.2 |
| DNA | Quadriceps | 1.0 | 1.77 | 0.7 | 1.9 | 7.7 | 0.9 |
| DNA | Diaphragm | — | — | — | — | — | — |

[1416] Capsid variant TTD-001 showed greater than 5,000 fold increase in payload-HA levels delivered to the brain as compared to AAV9 and measured by qRT-PCR and normalized to TBP. In all CNS tissues measured, TTD-001 showed dramatically enhanced delivery of payload-HA as compared to AAV9.

[1417] Immunohistochemistry of fixed brain tissues revealed dramatic transduction in both NHP tested by TTD-001 of the dentate nucleus, cerebellar cortex, cerebral cortex, brain stem, hippocampus, thalamus and putamen. AAV9 transduction of the dentate nucleus, cerebellar cortex, cerebral cortex, hippocampus, thalamus and putamen appeared negligible in comparison. TTD-001 therefore demonstrated broad and robust expression and distribution in the brain following intravenous administration in NHPs. In the dorsal root ganglia, both TTD-001 and AAV9 showed similar IHC patterns.

### Example 20. Maturation of TTD-001 Capsid in NHPs

[1418] This Example describes maturation of the TTD-001 (SEQ ID NO: 3623 (DNA) and 3636 (amino acid), comprising SEQ ID NO: 3648) capsid variant to further enhance its transduction and biodistribution in the central nervous system and evolve the AAV capsid variants further. Two approaches were used to mature the TTD-001 capsid sequence in order to randomize and mutate within and around the peptide insert comprised within loop VIII of the capsid variant. In the first maturation approach, sets of three contiguous amino acids were randomized across the mutagenesis region in the TTD-001 sequence, which spanned from position 587 to position 602, numbered according to SEQ ID NO: 3636. In the second maturation approach, mutagenic primers were used to introduce point mutations at a low frequency, scattered across the mutagenesis region in the TTD-001 sequences ranging from position 587 to position 602, numbered according to SEQ ID NO: 3636. AAV capsid variants arising from each maturation approach for TTD-001 were pooled together, for subsequent testing and characterization in NHPs (Macaca fascicularis and Callithrix jacchus).

[1419] The library of pooled matured AAV capsid variants generated from TTD-001 matured AAV capsid variant were injected into two cynomolgus macaques (Macaca fascicularis), two marmosets (Callithrix jacchus). After a period in life, the brains of the NHPs were isolated and RNA was extracted from three samples per NHP. Following RNA recovery and RT-PCR amplification, a systematic NGS enrichment analysis was performed to calculate the fold enrichment ratio relative to the corresponding TTD-001 control, and the peptides comprised within the variants were identified. The coefficient of variance (CV) was calculated for each peptide across the six samples, and those that had a CV value <1 were identified, as these were the peptides that were reliably detected in 5/6 or 6/6 of the brain samples isolated from the two NHPs. The average number of reads for each peptide across the samples investigated was also quantified. These TTD-001 matured capsid variants and their peptide sequences are provided in Table 41 (cynomolgus macaques (Macaca fascicularis)) and Table 42 (marmosets (Callithrix jacchus)).

[1420] As shown in Table 41, approximately 338 TTD-001 matured capsid variants demonstrated increased expression relative to the non-matured TTD-001 control, and several variants demonstrated greater than a two-fold enrichment relative to the non-matured TTD-001 control, in cynomolgus macaques (Macaca fascicularis). Also, across the peptides comprised within the TTD-001 matured capsid variants with the greatest fold-enrichment relative to the non-matured TTD-001 capsid in the brains of cynomolgus macaques, it was observed that the modifications in the variant sequences appeared in the C-terminal portion, specifically at residues corresponding to positions 593-595 of a reference sequence numbered according to the amino acid sequence of SEQ ID NO: 138. Additionally, 378 of the top peptides in Table 41 had an average read value of 1 or greater per sample, demonstrating that more functional capsid material was recovered, which could be indicative of less aggregation.

[1421] As shown in Table 42, many TTD-001 matured capsid variants demonstrated increased expression relative to both the AAV9 and the non-matured TTD-001 controls in the brains of marmosets. Approximately, 967 TTD-001 matured variants demonstrated increased expression relative to the non-matured TTD-001 control in the brain of marmosets, with 296 variants showing at least a 10-fold enrichment or greater relative to the non-matured TTD-001 control. Approximately, 850 TTD-001 matured variants demonstrated increased expression relative to AAV9 in the brain of marmosets, with 222 variants showing at least a 10-fold enrichment or greater relative to AAV9. With respect to those TTD-001 matured variants that demonstrated an increased expression in marmosets, it was observed that the majority comprised an amino acid other than Q at position 604 (e.g., Q604) numbered according to SEQ ID NO: 5, 8, or 3636 or at position 597 (Q597) numbered according to SEQ ID NO: 138 (e.g., an E, H, K, or P), such that they comprised the triplet “VEN,” “VHN,” “VKN,” or “VPN” at their C-terminus (corresponding to positions 596-598 of SEQ ID: 138 or positions 603-605 of SEQ ID NO: 5, 8, and 3636). Many of these TTD-001 matured variants also demonstrated an increased expression in the brain of cynomolgus macaques relative to AAV9 (Table 42), including the TTD-001 matured capsid variant comprising the sequence PLNGAVHLYAQAQLSPVKN (SEQ ID NO: 566) and the TTD-001 matured capsid variant comprising the sequence PLNGAVHLYAQAQTGWVPN (SEQ ID NO: 314).

[1422] The fold-change in expression relative to AAV9 and TTD-001 was also calculated in the DRG, heart, muscle (quadriceps), and liver for the TTD-001 matured variants in cynomolgus macaques. The fold-change in the DRG is shown in Table 42, with several variants showing decreased or comparable expression in the DRG relative to AAV9. These variants also demonstrated comparable or lower expression relative to AAV9 in the heart, muscle, and liver.

[1423] Taken together, these data demonstrate that following two maturation approaches, matured TTD-001 capsid variants with loop VIII modifications were generated with significantly enhanced CNS tropism in NHPs (cynomolgus macaques (Macaca fascicularis) and marmosets (Callithrix jacchus)), compared to the corresponding non-matured TTD-001 capsid variant, which already exhibited a significant fold enrichment over AAV9 in the NHP brain.

TABLE 41
NGS fold-enrichment of TTD-001 matured AAV capsid variants in the brain of NHPs

| | | | Fold | | | | | Fold | |
|---|---|---|---|---|---|---|---|---|---|
| | SEQ | | enrichment | | | SEQ | | enrichment | |
| Peptide | ID | | over TTD- | Avg. | Peptide | ID | | over TTD- | Avg. |
| Sequence | NO: | CV | 001 | Reads | Sequence | NO: | CV | 001 | Reads |
| QLNGAVHLYA | 139 | 0.206 | 5.617 | 0.09 | QLNGYVHLYA | 1138 | 0.513 | 0.626 | 0.09 |
| QAQLSPVQN | | | | | QAQTGWVQN | | | | |
| PLDGAVHLYA | 140 | 0.829 | 5.133 | 4.02 | QLNGAVHLYA | 639 | 0.845 | 0.626 | 0.09 |
| QPQTGWVQN | | | | | QAQTTGVQN | | | | |
| QLNGAVHLYA | 141 | 0.770 | 4.088 | 0.09 | PLNGAVHLYA | 640 | 0.602 | 0.625 | 39.96 |
| QAQTMSVQN | | | | | QAQTGFVQN | | | | |
| PLDSSVHLYA | 142 | 0.882 | 3.891 | 1.4 | PLNGAVHLYA | 641 | 0.536 | 0.625 | 42.62 |
| QAQTGWVQN | | | | | QAQSALVQN | | | | |
| PLNGAVHLYA | 143 | 0.879 | 3.879 | 5.47 | ALNGAVHLYA | 642 | 0.278 | 0.624 | 0.75 |
| QAQTTKVQN | | | | | QAQTGWDQN | | | | |
| PLDGAVHLYA | 144 | 0.586 | 3.835 | 11.08 | QLNGAVHLYA | 643 | 0.636 | 0.623 | 0.09 |
| QAQTGSVQN | | | | | QAQISGVQN | | | | |
| ALNGAVHLYA | 145 | 0.865 | 3.765 | 0.09 | QLNGAVHLYA | 644 | 0.520 | 0.623 | 0.14 |
| QAQTTSVQN | | | | | QAQRGSVQN | | | | |
| PLNGSVHLYA | 146 | 0.509 | 3.708 | 0.09 | PLNGAVHLYA | 645 | 0.270 | 0.622 | 0.19 |
| QAQTMSVQN | | | | | QAQTGWVKT | | | | |
| QLNGAVHLYA | 147 | 0.310 | 3.638 | 0.14 | PLNGAVHLYA | 646 | 0.554 | 0.619 | 27.62 |
| QAQTSPVQN | | | | | QAQSQLVQN | | | | |
| PLNGAVHLYA | 148 | 0.547 | 3.634 | 5.61 | PLNGSVHLYA | 647 | 0.202 | 0.617 | 0.33 |
| QAQTMKVQN | | | | | QAQTGWGQN | | | | |
| PLNGAVHLYA | 149 | 0.397 | 3.550 | 21.87 | QLNGAVHLYA | 648 | 0.632 | 0.616 | 0.14 |
| QAQVAQVQN | | | | | QAQTGWVPN | | | | |
| PLDGAVHLYA | 150 | 0.771 | 3.509 | 2.29 | PLNGAVHLYA | 649 | 0.305 | 0.615 | 0.33 |
| QAQTGGVQN | | | | | KAQTGWVKN | | | | |
| PLNGAVHLYA | 151 | 0.344 | 3.373 | 0.09 | PLNGAVHLYA | 650 | 0.164 | 0.615 | 0.09 |
| QAQTAWDQN | | | | | HAQTGWGQN | | | | |
| PLNGSVHLYA | 152 | 0.190 | 3.335 | 0.23 | ALNGAVHLYA | 651 | 0.330 | 0.613 | 0.61 |
| QAQTGWDQN | | | | | QAQTGWVQH | | | | |
| PLNGAVHLYA | 153 | 0.235 | 3.287 | 0.14 | PLNGSVHLYA | 652 | 0.585 | 0.612 | 0.14 |
| QAQTGSVQH | | | | | QAQIASVQN | | | | |
| PLNGAVHLYA | 154 | 0.564 | 3.259 | 4.25 | ALNGAVHLYA | 653 | 0.416 | 0.611 | 0.14 |
| QAQVKQVQN | | | | | QAQTAMVQN | | | | |
| PLNGAVHLYA | 155 | 0.763 | 3.239 | 24.54 | TLNGAVHLYA | 654 | 0.316 | 0.610 | 0.09 |
| QAQSAPVQN | | | | | QAQTMAVQN | | | | |
| PLNGAVHLYA | 156 | 0.591 | 3.156 | 6.73 | PHNGAVHLYA | 655 | 0.476 | 0.609 | 0.09 |
| QAQLSKVQN | | | | | QAQVSSVQN | | | | |
| PLNGAVHLYA | 157 | 0.587 | 3.107 | 31.03 | PLNGAVQLYA | 656 | 0.693 | 0.606 | 0.09 |
| QAQLAPVQN | | | | | QAQTAPVQN | | | | |
| PLNGAVHLYA | 158 | 0.416 | 3.061 | 15.33 | PLNGSVHLYA | 657 | 0.282 | 0.605 | 0.09 |
| QAQLAQVQN | | | | | QAQKGSVQN | | | | |
| QLNGAVHLYA | 159 | 0.295 | 3.051 | 0.09 | PLNGAVHLYA | 658 | 0.574 | 0.605 | 39.3 |
| QAQVASVQN | | | | | QAQLSAVQN | | | | |
| PLNGAVHLYA | 160 | 0.877 | 2.998 | 8.97 | PINGAVHLYA | 659 | 0.489 | 0.605 | 0.09 |
| QAQTAKVQN | | | | | QAQVSAVQN | | | | |
| PLNGAVHLYA | 161 | 0.678 | 2.971 | 3.27 | PLNGSVHLYA | 660 | 0.514 | 0.604 | 43.37 |
| QAQSAKVQN | | | | | QAQTGLVQN | | | | |
| PLNGAVHLYA | 162 | 0.095 | 2.962 | 0.09 | PLNGAVHIYA | 661 | 0.223 | 0.604 | 0.14 |
| QAQTGCFQN | | | | | QAQTGWFQN | | | | |
| PLNGAVHLYA | 163 | 0.705 | 2.958 | 5.51 | SLNGAVHLYA | 662 | 0.293 | 0.603 | 0.09 |
| QAQTQKVQN | | | | | QAQIASVQN | | | | |
| PLNGSVHLYA | 164 | 0.529 | 2.873 | 0.09 | PLNGAVHLYA | 663 | 0.220 | 0.601 | 0.14 |
| QAQTTSVQN | | | | | QEQTVSVQN | | | | |
| PLNGGVHLYA | 165 | 0.820 | 2.858 | 4.25 | PLNGAVHLYA | 664 | 0.737 | 0.601 | 0.09 |
| QAQTGRVQN | | | | | QAQTMQVQT | | | | |
| PLNGAVHLYA | 166 | 0.410 | 2.854 | 30.94 | HLNGAVHLYA | 665 | 0.338 | 0.600 | 56.78 |
| QAQTVAVQN | | | | | QAQTGWVQN | | | | |
| ALNGAVHLYA | 167 | 0.542 | 2.851 | 0.09 | PLNGAVHLYA | 666 | 0.400 | 0.600 | 24.02 |
| QAQSSPVQN | | | | | QAQTGQVQN | | | | |
| PLNGAVHLYA | 168 | 0.313 | 2.820 | 63.28 | QLNGAVHLYA | 667 | 0.596 | 0.599 | 0.19 |
| QAQLSPVQN | | | | | QAQTGWVQD | | | | |
| QLNGAVHLYA | 169 | 0.846 | 2.769 | 0.14 | PLNGAVHLYD | 668 | 0.526 | 0.599 | 0.09 |
| QAQTTSVQN | | | | | QAQVAQVQN | | | | |
| PLNGAVHLYA | 170 | 0.334 | 2.719 | 18.37 | PLNGAVHLYA | 669 | 0.515 | 0.598 | 0.19 |
| QAQTTQVQN | | | | | QAQTSPVKN | | | | |
| PLNGAVHLYA | 171 | 0.523 | 2.707 | 25.84 | PLNGAIHLYA | 670 | 0.383 | 0.595 | 0.09 |
| QAQTAQVQN | | | | | QAQTSPVQN | | | | |
| QLNGAVHLYA | 172 | 0.195 | 2.682 | 0.09 | PLNGSVHLYA | 671 | 0.578 | 0.595 | 0.19 |
| QAQTVAVQN | | | | | QAQTAMVQN | | | | |
| PLNGAVHLYA | 173 | 0.682 | 2.652 | 3.27 | PLNGAVHLYA | 672 | 0.370 | 0.594 | 0.09 |
| QAQRIAVQN | | | | | QAQLSQVQT | | | | |
| PLNGAVHLYA | 174 | 0.340 | 2.634 | 17.34 | PLNGAVHLYA | 673 | 0.310 | 0.594 | 0.19 |
| QAQRASVQN | | | | | QAQTGSVLN | | | | |
| PLNGAVHLYA | 175 | 0.400 | 2.620 | 45.19 | PLNGAIHLYA | 674 | 0.428 | 0.593 | 0.09 |
| QAQTTPVQN | | | | | QAQTASVQN | | | | |
| QLNGAVHLYA | 176 | 0.474 | 2.613 | 0.09 | PLNGAVHLYA | 675 | 0.785 | 0.592 | 6.68 |
| QAQLASVQN | | | | | QAQTNGVQN | | | | |
| PLNGAVHLYA | 177 | 0.528 | 2.574 | 39.86 | PLNGSVHLYA | 676 | 0.334 | 0.591 | 0.14 |
| QAQLTPVQN | | | | | QAQTGWVQY | | | | |
| PLNGAVHLYA | 178 | 0.519 | 2.572 | 26.5 | PLNGALHLYA | 677 | 0.463 | 0.590 | 0.09 |
| QAQSTPVQN | | | | | QAQTSPVQN | | | | |
| PLNGAVHLYA | 179 | 0.335 | 2.562 | 72.81 | ALNGAVHLYA | 678 | 0.399 | 0.589 | 1.59 |
| QAQTSPVQN | | | | | QAQTGWVQT | | | | |
| QLNGAVHLYA | 180 | 0.428 | 2.528 | 0.09 | PLNGAVHLYA | 679 | 0.193 | 0.586 | 0.47 |
| QAQVSQVQN | | | | | QAQTGWVKK | | | | |
| PLNGAVHLYA | 181 | 0.625 | 2,523 | 19.96 | QLNGAVHLYA | 680 | 0.630 | 0.584 | 1450 |
| QAQTMQVQN | | | | | QAQTGWVQN | | | | |
| PLNGAVHLYA | 182 | 0.458 | 2.476 | 8.32 | PLNGDVHLYA | 681 | 0.630 | 0.580 | 0.09 |
| QAQTSKVQN | | | | | QAQTVAVQN | | | | |
| SLNGAVHLYA | 183 | 0.282 | 2.417 | 0.09 | PLNGGVHLYA | 682 | 0.501 | 0.580 | 0.47 |
| QAQVSPVQN | | | | | QAQPGWVQN | | | | |
| PLNGAVHLYA | 184 | 0.259 | 2.411 | 34.72 | PLNGAVHLYA | 683 | 0.897 | 0.579 | 7.66 |
| QAQVSQVQN | | | | | QAQAAAVQN | | | | |
| PLNGAVHLYA | 185 | 0.721 | 2.404 | 63.42 | PLNGAVHLYA | 684 | 0.618 | 0.579 | 19.72 |
| QAQVSPVQN | | | | | QAQSAVVQN | | | | |
| PLNGAVHLYA | 186 | 0.586 | 2.389 | 15.56 | TLNGAVHLYA | 685 | 0.646 | 0.578 | 0.09 |
| QAQTVQVQN | | | | | QAQRSSVQN | | | | |
| PLNGAVHLYA | 187 | 0.476 | 2.367 | 13.65 | PLNGAVHLYA | 686 | 0.214 | 0.578 | 0.14 |
| QAQVTAVQN | | | | | QAQPGWVQH | | | | |
| PLNGAVHLYA | 188 | 0.715 | 2.353 | 8.74 | PLDGAVHLYA | 687 | 0.214 | 0.577 | 0.09 |
| QAQRQPVQN | | | | | QAQTLSVQN | | | | |
| PLNGNVHLYA | 189 | 0.732 | 2.346 | 2.38 | PLNGAVHLYA | 688 | 0.310 | 0.575 | 0.19 |
| QAQTGGVQN | | | | | QAQTASDQN | | | | |
| PLDGAVHLYA | 190 | 0.697 | 2.339 | 7.06 | PLNGAVHLYA | 689 | 0.633 | 0.575 | 53.51 |
| QAQTAWVQN | | | | | QAQLSGVQN | | | | |
| PLNGAVHLYA | 191 | 0.785 | 2.331 | 9.91 | TLNGAVHLYA | 690 | 0.463 | 0.572 | 0.14 |
| QAQISGVQN | | | | | QAQTVAVQN | | | | |
| PLNGAVHLYA | 192 | 0.794 | 2.324 | 6.22 | PLNGAVHLYA | 691 | 0.293 | 0.572 | 0.09 |
| QAQVRPVQN | | | | | QEQVASVQN | | | | |
| PLNGAVHLYA | 193 | 0.722 | 2.299 | 20.47 | PVNGAVHLYA | 692 | 0.873 | 0.572 | 0.09 |
| QAQLGPVQN | | | | | QAQTGWAQN | | | | |
| PLNGAVHLYA | 194 | 0.404 | 2.290 | 4.91 | PLNGAVHLYA | 693 | 0.567 | 0.570 | 14.07 |
| QAQTNQVQN | | | | | QAQSSRVQN | | | | |
| PLNGAVHLYA | 195 | 0.291 | 2.240 | 14.39 | PLNGSVHLYA | 694 | 0.551 | 0.569 | 0.19 |
| QAQVQQVQN | | | | | QAQLGSVQN | | | | |
| PLNGAVHLYA | 196 | 0.520 | 2.238 | 9.21 | PLNGAVHLYA | 695 | 0.565 | 0.568 | 1.22 |
| QAQVANVQN | | | | | QAQSPPVQN | | | | |
| PLNGAVHLYA | 197 | 0.664 | 2.200 | 10.75 | PLNGAVHHYA | 696 | 0.605 | 0.567 | 0.14 |
| QAQAAPVQN | | | | | QAQTTSVQN | | | | |
| QLNGAVHLYA | 198 | 0.388 | 2.199 | 0.09 | PLNGAVHLYD | 697 | 0.832 | 0.567 | 0.09 |
| QAQVAQVQN | | | | | QAQSTPVQN | | | | |
| PLNGAVHLYA | 199 | 0.487 | 2.195 | 21.59 | QLNGAVHLYA | 698 | 0.529 | 0.567 | 0.37 |
| QAQRSTVQN | | | | | QAQTGWVRN | | | | |
| PLNGAVHLYA | 200 | 0.334 | 2.190 | 29.72 | PLNGAVHLYA | 699 | 0.597 | 0.563 | 0.09 |
| QAQTMAVQN | | | | | QAQVQPVQT | | | | |
| PLNGAVHLYA | 201 | 0.838 | 2.182 | 7.1 | PLNGAVHLYA | 700 | 0.416 | 0.562 | 0.14 |
| QAQIQPVQN | | | | | QAQTSSVKN | | | | |
| PLNGAVHLYA | 202 | 0.567 | 2.181 | 15.52 | PLNGALHLYA | 701 | 0.301 | 0.560 | 0.09 |
| QAQIASVQN | | | | | QAQTASVQN | | | | |
| PLNGAVHLYA | 203 | 0.172 | 2.176 | 76.22 | PLNGAVHHYA | 702 | 0.731 | 0.558 | 0.09 |
| QAQTVSVQN | | | | | QAQSAPVQN | | | | |
| PLNGAVHLYA | 204 | 0.585 | 2.156 | 12.43 | PLNGSVHLYA | 703 | 0.169 | 0.556 | 0.47 |
| QAQRGSVQN | | | | | QAQTGWVHN | | | | |
| PLNGAVHLYA | 205 | 0.376 | 2.143 | 12.85 | PLNGAVHLYA | 704 | 0.519 | 0.556 | 0.09 |
| QAQNSPVQN | | | | | QAQLSPLQN | | | | |
| PLNGAVHLYA | 206 | 0.363 | 2.131 | 24.3 | PLNGAVHLYA | 705 | 0.841 | 0.554 | 0.09 |
| QAQLQPVQN | | | | | KAQVTPVQN | | | | |
| PLNGAVHLYA | 207 | 0.550 | 2.125 | 11.68 | PLNGAVNLYA | 706 | 0.278 | 0.554 | 0.09 |
| QAQVTGVQN | | | | | QAQTQPVQN | | | | |
| PLNGAVHLYA | 208 | 0.810 | 2.121 | 11.26 | SLNGAVHLYA | 707 | 0.518 | 0.553 | 92.07 |
| QAQVMQVQN | | | | | QAQTGLVQN | | | | |
| PLNGAVHLYA | 209 | 0.697 | 2.104 | 14.86 | PLDGSVHLYA | 708 | 0.366 | 0.552 | 0.09 |
| QAQSMAVQN | | | | | QAQTGGVQN | | | | |
| PLNGAVHLYA | 210 | 0.611 | 2.104 | 4.49 | PLNGAVHLYD | 709 | 0.528 | 0.552 | 0.09 |
| QAQVGKVQN | | | | | QAQTLPVQN | | | | |
| ALNGAVHLYA | 211 | 0.652 | 2.101 | 0.09 | PLNGAVHLYA | 710 | 0.441 | 0.551 | 0.09 |
| QAQSAPVQN | | | | | QAQVSQVQK | | | | |
| PLNGAVHLYA | 212 | 0.498 | 2.101 | 3.97 | PLNGAVHLYA | 711 | 0.425 | 0.551 | 13.97 |
| QAQIQSVQN | | | | | QAQLVGVQN | | | | |
| PLNGAVHLYA | 213 | 0.537 | 2.097 | 17.15 | PLNGAVHLYA | 712 | 0.390 | 0.549 | 0.09 |
| QAQCSPVQN | | | | | QEQTSSVQN | | | | |
| PLNGAVHLYA | 214 | 0.821 | 2.079 | 3.97 | PLNGAVHIYA | 713 | 0.435 | 0.549 | 0.09 |
| QAQLQRVQN | | | | | QAQTVAVQN | | | | |
| PLNGAVHLYA | 215 | 0.330 | 2.063 | 0.09 | PLNGAVNLYA | 714 | 0.831 | 0.548 | 0.14 |
| QAQTAWVQH | | | | | QAQVTPVQN | | | | |
| PLDGAVHLYA | 216 | 0.650 | 2.062 | 0.09 | TLNGAVHLYA | 715 | 0.252 | 0.547 | 0.19 |
| QAQTGWDQN | | | | | QAQTMSVQN | | | | |
| PLNGAVHLYA | 217 | 0.411 | 2.062 | 0.89 | TLNGAVHLYA | 716 | 0.341 | 0.541 | 0.09 |
| QAQTPPVQN | | | | | QAQTLAVQN | | | | |
| PLNGAVHLYA | 218 | 0.635 | 2.054 | 1.68 | PINGAVHLYA | 717 | 0.341 | 0.540 | 0.09 |
| QAQVTKVQN | | | | | QAQVAQVQN | | | | |
| PLNGAVHLYA | 219 | 0.556 | 2.033 | 50.94 | PLNGQVHLYA | 718 | 0.885 | 0.540 | 12.57 |
| QAQSSPVQN | | | | | QAQTGWVQN | | | | |
| PLNGAVHLYA | 220 | 0.793 | 2.015 | 9.07 | QLNGAVHLYA | 719 | 0.892 | 0.540 | 39.63 |
| QAQAGPVQN | | | | | QAQTGGVQN | | | | |
| PLNGAVHLYA | 221 | 0.773 | 2.014 | 5.89 | PLNGAVHLYA | 720 | 0.542 | 0.539 | 0.09 |
| QAQLARVQN | | | | | QAQTLSVKN | | | | |
| PLNGAVHLYA | 222 | 0.789 | 2.013 | 16.36 | PLNGTVHLYA | 721 | 0.331 | 0.538 | 0.37 |
| QAQTTTVQN | | | | | QAQTGWDQN | | | | |
| PLNGAVHLYA | 223 | 0.254 | 2.011 | 0.09 | PLNGAVHLYA | 722 | 0.476 | 0.537 | 0.14 |
| QAQTGGFQN | | | | | QAQTGWFQK | | | | |
| PLNGAVHLYA | 224 | 0.657 | 2.010 | 24.44 | ALNGAVHLYA | 723 | 0.447 | 0.536 | 0.09 |
| QAQTLQVQN | | | | | QAQTSKVQN | | | | |
| PLNGAVHLYA | 225 | 0.359 | 2.005 | 63.42 | ALNGTVHLYA | 724 | 0.712 | 0.535 | 49.16 |
| QAQTMSVQN | | | | | QAQTGWVQN | | | | |
| QLNGAVHLYA | 226 | 0.675 | 2.004 | 0.09 | PLNGAVPLYA | 725 | 0.256 | 0.534 | 0.14 |
| QAQLQPVQN | | | | | QAQTGWVQH | | | | |
| PLNGAVHLYA | 227 | 0.894 | 1.994 | 10.47 | PLNGAVHLYA | 726 | 0.355 | 0.533 | 0.23 |
| QAQVAKVQN | | | | | QAKTGWVQK | | | | |
| PLNGAVHLYA | 228 | 0.217 | 1.989 | 7.2 | PLNGAVHLYA | 727 | 0.492 | 0.531 | 1.12 |
| QAQRAAVQN | | | | | QAQTPAVQN | | | | |
| PLNGAVHLYA | 229 | 0.413 | 1.988 | 38.79 | PLNGAVHLYA | 728 | 0.538 | 0.531 | 0.14 |
| QAQTVGVQN | | | | | QAQTVGVKN | | | | |
| PLNGAVHLYA | 230 | 0.381 | 1.972 | 15.84 | PLNGAVHLYA | 729 | 0.307 | 0.530 | 0.14 |
| QAQLNPVQN | | | | | QEQTGWFQN | | | | |
| PLNGAVHLYA | 231 | 0.379 | 1.971 | 26.17 | PLNGAVHLYA | 730 | 0.569 | 0.530 | 0.09 |
| QAQLSQVQN | | | | | QAQKGWDQN | | | | |
| PLNGTVHLYA | 232 | 0.421 | 1.967 | 23.37 | PLNGAVHLYD | 731 | 0.605 | 0.529 | 0.09 |
| QAQTGSVQN | | | | | QAQTSAVQN | | | | |
| PLNGAVHLYA | 233 | 0.543 | 1.960 | 12.95 | PLDGAVHLYA | 732 | 0.657 | 0.527 | 0.37 |
| QAQTKPVQN | | | | | QAQTGWVQK | | | | |
| PLNGAVHLYA | 234 | 0.603 | 1.957 | 7.71 | PLNGAVHLYA | 733 | 0.290 | 0.524 | 0.09 |
| QAQTNAVQN | | | | | QAQTAWVLN | | | | |
| ALDGAVHLYA | 235 | 0.660 | 1.955 | 21.4 | PLNGSVHLYA | 734 | 0.172 | 0.524 | 0.28 |
| QAQTGWVQN | | | | | QAQTGWVLN | | | | |
| PLNGAVHLYA | 236 | 0.303 | 1.955 | 22.06 | QLNGAVHLYA | 735 | 0.605 | 0.524 | 1.68 |
| QAQLATVQN | | | | | QAQTGWVQT | | | | |
| PLNGAVHLYA | 237 | 0.794 | 1.947 | 40.85 | PLNGAVHLYA | 736 | 0.699 | 0.524 | 0.98 |
| QAQVTPVQN | | | | | QAQVPPVQN | | | | |
| PLNGAVHLYA | 238 | 0.339 | 1.946 | 22.2 | PVNGAVHLYA | 737 | 0.734 | 0.522 | 0.09 |
| QAQVQAVQN | | | | | QAQVQSVQN | | | | |
| PLNGAVHLYA | 239 | 0.645 | 1.926 | 58.32 | QLNGAVHLYA | 738 | 0.473 | 0.522 | 0.09 |
| QAQTTSVQN | | | | | QAQTKSVQN | | | | |
| PLNGAVHLYA | 240 | 0.702 | 1.923 | 9.21 | PVNGAVHLYA | 739 | 0.825 | 0.522 | 0.23 |
| QAQCTPVQN | | | | | QAQTSSVQN | | | | |
| ALNGAVHLYA | 241 | 0.621 | 1.916 | 9.58 | PLNGAVHLYA | 740 | 0.797 | 0.520 | 11.45 |
| QAQTGRVQN | | | | | QAQATGVQN | | | | |
| PLNGSVHLYA | 242 | 0.173 | 1.908 | 0.09 | TLNGAVHLYA | 741 | 0.553 | 0.518 | 0.09 |
| QAQTGWVQD | | | | | QAQLSQVQN | | | | |
| PLNGAVHLYA | 243 | 0.555 | 1.903 | 30.47 | PLDGAVHLYA | 742 | 0.486 | 0.517 | 0.37 |
| QAQTAGVQN | | | | | QAQTVSVQN | | | | |
| PLNGAVHLYA | 244 | 0.431 | 1.902 | 29.82 | SLNGAVHLYA | 743 | 0.421 | 0.514 | 0.09 |
| QAQTSQVQN | | | | | QAQTKPVQN | | | | |
| PLNGAVHLYA | 245 | 0.443 | 1.895 | 6.4 | PLKGAVHLYA | 744 | 0.705 | 0.514 | 0.09 |
| QAQTMNVQN | | | | | QAQSAPVQN | | | | |
| PLNGAVHLYA | 246 | 0.323 | 1.885 | 34.16 | PLNGAVHLYA | 745 | 0.275 | 0.514 | 0.19 |
| QAQTSTVQN | | | | | QAKTGWVKN | | | | |
| PLNGAVHLYA | 247 | 0.712 | 1.882 | 12.43 | PLNGSVHLYA | 746 | 0.680 | 0.513 | 0.09 |
| QAQVKPVQN | | | | | QAQTLGVQN | | | | |
| PLNGAVHLYA | 248 | 0.627 | 1.878 | 24.91 | PLKGAVHLYA | 747 | 0.626 | 0.512 | 0.09 |
| QAQASPVQN | | | | | QAQLAPVQN | | | | |
| PLNGAVHLYA | 249 | 0.447 | 1.873 | 23.27 | PLNGSVHLYA | 748 | 0.207 | 0.512 | 1.17 |
| QAQVAAVQN | | | | | QAQTGWVQK | | | | |
| PLNGAVHLYA | 250 | 0.692 | 1.869 | 8.74 | PLNGAVHLYA | 749 | 0.295 | 0.511 | 0.28 |
| QAQLKSVQN | | | | | QAQTGGVQI | | | | |
| PLNGAVHLYA | 251 | 0.834 | 1.855 | 8.09 | PLNGAVHLYA | 750 | 0.440 | 0.510 | 0.37 |
| QAQIAAVQN | | | | | QPQTGWVQT | | | | |
| PLNGAVHLYA | 252 | 0.115 | 1.850 | 26.78 | PLNGAVHLYA | 751 | 0.196 | 0.508 | 4.02 |
| QAQTAAVQN | | | | | QAQTGWVLN | | | | |
| PLNGAVHLYA | 253 | 0.742 | 1.850 | 10.05 | PLNGAVHLYD | 752 | 0.611 | 0.507 | 0.14 |
| QAQTKAVQN | | | | | QAQLTPVQN | | | | |
| PLNGAVHLYA | 254 | 0.223 | 1.848 | 0.09 | QLNGAVHLYA | 753 | 0.558 | 0.507 | 0.28 |
| QAQTGSVQS | | | | | QAQTATVQN | | | | |
| PLNGAVHLYA | 255 | 0.518 | 1.845 | 7.6 | PLNGAVHLYA | 754 | 0.359 | 0.505 | 0.19 |
| QAQVSNVQN | | | | | QAQTAWGQN | | | | |
| PLNGAVHLYA | 256 | 0.690 | 1.834 | 38.65 | PLNGAVHLYA | 755 | 0.273 | 0.505 | 6.78 |
| QAQTAPVQN | | | | | QAQTGWVHN | | | | |
| PLNGAVHLYA | 257 | 0.740 | 1.833 | 28.13 | PLKGAVHLYA | 756 | 0.556 | 0.505 | 0.09 |
| QAQLMPVQN | | | | | QAQSSPVQN | | | | |
| PLNGAVHLYA | 258 | 0.798 | 1.824 | 8.88 | PLNGAVHLYA | 757 | 0.374 | 0.505 | 0.09 |
| QAQLHPVQN | | | | | QAQLGSVQT | | | | |
| PLNGAVHLYA | 259 | 0.793 | 1.823 | 5.09 | PLNGAVHLYA | 758 | 0.656 | 0.505 | 7.62 |
| QAQRAQVQN | | | | | QAQSANVQN | | | | |
| PLNGAVHLYA | 260 | 0.871 | 1.823 | 1.92 | PLNGGVHLYA | 759 | 0.866 | 0.503 | 23.27 |
| QAQLTNVQN | | | | | QAQTGSVQN | | | | |
| PLNGAVHLYA | 261 | 0.766 | 1.822 | 13.18 | PLNGAVHLYD | 760 | 0.433 | 0.503 | 0.09 |
| QAQRTTVQN | | | | | QAQRSSVQN | | | | |
| PLNGAVHLYA | 262 | 0.700 | 1.821 | 17.9 | PLNGAVHLYA | 761 | 0.164 | 0.502 | 0.19 |
| QAQTSVVQN | | | | | QAQTGGVQD | | | | |
| SLNGAVHLYA | 263 | 0.867 | 1.819 | 0.14 | PLNGAVHLYA | 762 | 0.271 | 0.502 | 0.09 |
| QAQTMSVQN | | | | | QAQTMAVKN | | | | |
| ALNGAVHLYA | 264 | 0.672 | 1.818 | 0.09 | PLNGAVHLYA | 763 | 0.325 | 0.501 | 0.23 |
| QAQTLAVQN | | | | | QAQTASVKN | | | | |
| PLNGAVHLYA | 265 | 0.736 | 1.816 | 12.2 | PLNGAVHLYA | 764 | 0.531 | 0.501 | 0.14 |
| QAQRMSVQN | | | | | QAQSSPVQK | | | | |
| ALNGAVHLYA | 266 | 0.342 | 1.813 | 0.14 | PLNGAVHLYA | 765 | 0.275 | 0.499 | 21.68 |
| QAQLTPVQN | | | | | QAQTGWVKN | | | | |
| PLNGAVHLYA | 267 | 0.785 | 1.807 | 3.65 | ALNGAVHLYA | 766 | 0.735 | 0.499 | 25.05 |
| QAQVGNVQN | | | | | QAQTGGVQN | | | | |
| PLNGAVHLYA | 268 | 0.615 | 1.805 | 4.91 | PLNGAVHLYA | 767 | 0.676 | 0.498 | 0.09 |
| QAQLMQVQN | | | | | QAQTGTVQT | | | | |
| PLNGSVHLYA | 269 | 0.550 | 1.795 | 0.09 | PLNGAVHLYA | 768 | 0.476 | 0.495 | 7.43 |
| QAQTAQVQN | | | | | QAQTGWVQI | | | | |
| PLNGAVHLYA | 270 | 0.544 | 1.793 | 24.12 | PINGAVHLYA | 769 | 0.382 | 0.494 | 0.09 |
| QAQTATVQN | | | | | QAQTSLVQN | | | | |
| PLNGAVHLYA | 271 | 0.727 | 1.790 | 7.8 | PLNGAVHIYA | 770 | 0.502 | 0.492 | 0.09 |
| QAQVHPVQN | | | | | QAQVAQVQN | | | | |
| PLNGAVHLYA | 272 | 0.836 | 1.771 | 0.09 | PLNGAVHLYA | 771 | 0.279 | 0.491 | 0.19 |
| QAQVSPVQT | | | | | QAQTVWVKN | | | | |
| PLNGAVHLYA | 273 | 0.638 | 1.766 | 9.11 | TLNGAVHLYA | 772 | 0.827 | 0.491 | 0.09 |
| QAQISSVQN | | | | | QAQLMPVQN | | | | |
| PLNGAVHLYA | 274 | 0.333 | 1.765 | 62.16 | PLNGAVHIYA | 773 | 0.672 | 0.490 | 0.09 |
| QAQVASVQN | | | | | QAQTAPVQN | | | | |
| PLNGAVHLYA | 275 | 0.347 | 1.757 | 0.09 | PLYGAVHLYA | 774 | 0.240 | 0.488 | 0.09 |
| QAQTRWDQN | | | | | QAQTASVQN | | | | |
| PLNGAVHLYA | 276 | 0.508 | 1.750 | 8.88 | TLNGAVHLYA | 775 | 0.643 | 0.488 | 0.09 |
| QAQTMTVQN | | | | | QAQLGPVQN | | | | |
| PLNGAVHLYA | 277 | 0.551 | 1.747 | 34.21 | PLDGAVHLYA | 776 | 0.637 | 0.487 | 0.42 |
| QAQRSSVQN | | | | | QAQTGWVKN | | | | |
| PLNGGVHLYA | 278 | 0.547 | 1.743 | 0.09 | PLKGAVHLYA | 777 | 0.669 | 0.487 | 0.14 |
| QAQTGWVRN | | | | | QAQVSPVQN | | | | |
| PLNGAVHLYA | 279 | 0.281 | 1.741 | 213 | PLNGAVHLYA | 778 | 0.563 | 0.486 | 9.95 |
| QAQTAWVQN | | | | | QAQSQQVQN | | | | |
| PLNGSVHLYA | 280 | 0.130 | 1.734 | 0.28 | PLNGAVDLYA | 779 | 0.497 | 0.484 | 0.09 |
| QAQPGWVQN | | | | | QAQLSPVQN | | | | |
| ALNGAVHLYA | 281 | 0.238 | 1.724 | 0.09 | PLNGAVHLYA | 780 | 0.506 | 0.484 | 0.09 |
| QAQTGWAQN | | | | | QAQVGSVQT | | | | |
| PLNGAVHLYA | 282 | 0.791 | 1.724 | 8.93 | PLNGTVHLYA | 781 | 0.405 | 0.483 | 0.14 |
| QAQRTGVQN | | | | | QAQTGWAQN | | | | |
| ALNGAVHLYA | 283 | 0.370 | 1.720 | 0.09 | ALNGAVHLYA | 782 | 0.283 | 0.482 | 0.09 |
| QAQTGWVQS | | | | | QAQTGLVQT | | | | |
| PLNGAVHLYA | 284 | 0.561 | 1.701 | 22.34 | PLNGAVHLYA | 783 | 0.562 | 0.482 | 35.42 |
| QAQVATVQN | | | | | QAQSSMVQN | | | | |
| PLNGAVHLYA | 285 | 0.480 | 1.700 | 16.68 | PLNGAVHLYA | 784 | 0.484 | 0.481 | 0.09 |
| QAQVTSVQN | | | | | KAQTAGVQN | | | | |
| PLNGAVHLYA | 286 | 0.313 | 1.699 | 74.78 | PLNGAVHLYA | 785 | 0.516 | 0.480 | 0.09 |
| QAQVSSVQN | | | | | HAQTGWVQK | | | | |
| PLNGSVHLYA | 287 | 0.353 | 1.683 | 0.14 | PLNGAVHLYA | 786 | 0.502 | 0.479 | 0.23 |
| QAQTSSVQN | | | | | QAQTSPVQK | | | | |
| PLNGAVHLYA | 288 | 0.348 | 1.682 | 18.83 | PLNGAVHLYA | 787 | 0.841 | 0.477 | 7.66 |
| QAQTNSVQN | | | | | QAQAVGVQN | | | | |
| PLNGAVHLYA | 289 | 0.815 | 1.681 | 6.03 | PLNGAVPLYA | 788 | 0.438 | 0.477 | 0.09 |
| QAQVKAVQN | | | | | QAQTGWGQN | | | | |
| PLNGAVHLYA | 290 | 0.689 | 1.666 | 19.02 | PLNGTVHLYA | 789 | 0.495 | 0.477 | 0.09 |
| QAQSGPVQN | | | | | QAQLGSVQN | | | | |
| PLNGAVHLYA | 291 | 0.660 | 1.663 | 25.61 | QLNGAVHLYA | 790 | 0.645 | 0.476 | 0.75 |
| QAQTGPVQN | | | | | QAQTGWVQH | | | | |
| PLNGAVHLYA | 292 | 0.537 | 1.660 | 22.9 | PLNGSVHLYA | 791 | 0.175 | 0.475 | 1.4 |
| QAQTAMVQN | | | | | QAQTGWVKN | | | | |
| PLNGAVHLYA | 293 | 0.358 | 1.628 | 32.11 | PLNGAVHLYD | 792 | 0.812 | 0.475 | 0.09 |
| QAQTQPVQN | | | | | QAQVAPVQN | | | | |
| PLNGSVHLYA | 294 | 0.533 | 1.625 | 32.76 | PLNGAVNLYA | 793 | 0.460 | 0.473 | 0.19 |
| QAQTGSVQN | | | | | QAQVSSVQN | | | | |
| PLNGAVHLYA | 295 | 0.519 | 1.625 | 14.44 | PLNGAVHLYA | 794 | 0.646 | 0.472 | 0.09 |
| QAQTQQVQN | | | | | QAQTLPVQK | | | | |
| PLNGAVHLYA | 296 | 0.824 | 1.620 | 9.86 | PLNGSVHLYA | 795 | 0.337 | 0.469 | 0.93 |
| QAQVSRVQN | | | | | QAQTASVQN | | | | |
| QLNGAVHLYA | 297 | 0.436 | 1.617 | 0.09 | ALNGAVHLYA | 796 | 0.294 | 0.468 | 0.37 |
| QAQVLPVQN | | | | | QAQTGWGQN | | | | |
| PLNGAVHLYA | 298 | 0.266 | 1.610 | 0.14 | PLNGAVHLYA | 797 | 0.286 | 0.468 | 7.48 |
| QAQTGWVQP | | | | | QAQTGWGQN | | | | |
| QLNGAVHLYA | 299 | 0.776 | 1.609 | 0.09 | PLNGAAHLYA | 798 | 0.451 | 0.467 | 0.09 |
| QAQLGSVQN | | | | | QAQTSPVQN | | | | |
| PLNGAVHLYA | 300 | 0.360 | 1.604 | 40.29 | PLNGAVHLYA | 799 | 0.646 | 0.465 | 0.14 |
| QAQVSAVQN | | | | | QAQTGRVQH | | | | |
| PLNGAVHLYA | 301 | 0.593 | 1.604 | 7.8 | PINGAVHLYA | 800 | 0.768 | 0.464 | 0.09 |
| QAQVLSVQN | | | | | QAQTGWVQS | | | | |
| PLNGAVHLYA | 302 | 0.861 | 1.601 | 5.05 | PLNGAVHLYA | 801 | 0.454 | 0.464 | 2.24 |
| QAQTQHVQN | | | | | QAQTPSVQN | | | | |
| PLNGAVHLYA | 303 | 0.113 | 1.590 | 52.72 | PLNGAVHLYD | 802 | 0.450 | 0.464 | 0.09 |
| QAQLASVQN | | | | | QAQTTAVQN | | | | |
| PLNGAVHLYA | 304 | 0.649 | 1.581 | 8.83 | PLNGNVHLYA | 803 | 0.415 | 0.462 | 0.09 |
| QAQQAPVQN | | | | | QAQTGWVQK | | | | |
| PLNGAVHLYA | 305 | 0.577 | 1.574 | 3.08 | PLNGAVHLYA | 804 | 0.167 | 0.462 | 2.62 |
| QAQNAQVQN | | | | | QAQTGWVEN | | | | |
| PLNGAVHLYA | 306 | 0.760 | 1.567 | 12.81 | PLNGAVNLYA | 805 | 0.371 | 0.461 | 0.19 |
| QAQATPVQN | | | | | QAQTTPVQN | | | | |
| PLNGAVHLYA | 307 | 0.544 | 1.567 | 28.13 | PLNGAVNLYA | 806 | 0.489 | 0.461 | 0.09 |
| QAQVQPVQN | | | | | QAQLSQVQN | | | | |
| PLNGAVHLYA | 308 | 0.537 | 1.563 | 33.13 | SLNGAVHLYA | 807 | 0.263 | 0.460 | 0.14 |
| QAQTTAVQN | | | | | QAQVMSVQN | | | | |
| PLNGAVHLYA | 309 | 0.455 | 1.561 | 3.46 | QLNGAVHLYA | 808 | 0.622 | 0.458 | 0.33 |
| QAQTGWVRN | | | | | QAQTGWVQS | | | | |
| PLNGAVHLYA | 310 | 0.357 | 1.561 | 21.83 | PINGAVHLYA | 809 | 0.534 | 0.457 | 0.19 |
| QAQLAAVQN | | | | | QAQTGWFQN | | | | |
| PLNGAVHLYA | 311 | 0.418 | 1.555 | 0.09 | PLNGDVHLYA | 810 | 0.419 | 0.456 | 0.14 |
| QAQTSPDQN | | | | | QAQVSSVQN | | | | |
| PLNGAVHLYA | 312 | 0.393 | 1.553 | 16.36 | PLNGGVHLYA | 811 | 0.482 | 0.456 | 0.28 |
| QAQRSGVQN | | | | | QAQTGWVQS | | | | |
| PLNGAVHLYA | 313 | 0.218 | 1.551 | 0.65 | PLNGAVNLYA | 812 | 0.559 | 0.456 | 0.09 |
| QAQTGGVQT | | | | | QAQRSTVQN | | | | |
| PLNGAVHLYA | 314 | 0.274 | 1.546 | 0.93 | ALNGAVHLYA | 813 | 0.298 | 0.455 | 0.14 |
| QAQTGWVPN | | | | | QAQTGWVQY | | | | |
| PLDSAVHLYA | 315 | 0.833 | 1.539 | 10.89 | PLNGAVHHYA | 814 | 0.170 | 0.455 | 0.09 |
| QAQTGWVQN | | | | | QAQTAAVQN | | | | |
| PLNGAVHLYA | 316 | 0.496 | 1.537 | 0.09 | PLNGAVHRYA | 815 | 0.346 | 0.454 | 0.0 |
| QAQTTPVQT | | | | | QAQTGWVQH | | | | |
| PLNGAVHLYA | 317 | 0.540 | 1.535 | 7.94 | QLNGAVHLYA | 816 | 0.627 | 0.453 | 0.37 |
| QAQLMAVQN | | | | | QAQTGWVHN | | | | |
| PLNGAVHLYA | 318 | 0.596 | 1.532 | 36.69 | PLNGAVHLYA | 817 | 0.861 | 0.452 | 56.6 |
| QAQTMPVQN | | | | | QAQRGWVQN | | | | |
| PLNGAVHHYA | 319 | 0.391 | 1.529 | 0.09 | PLNGAVHLYA | 818 | 0.233 | 0.450 | 0.14 |
| QAQTSPVQN | | | | | QAQTGSVEN | | | | |
| PLNGAVHLYA | 320 | 0.756 | 1.527 | 7.8 | ALNGAVHLYA | 819 | 0.249 | 0.450 | 0.37 |
| QAQLANVQN | | | | | QAQTGWVHN | | | | |
| PLNGAVHLYA | 321 | 0.606 | 1.520 | 11.68 | PLNGAVNLYA | 820 | 0.494 | 0.449 | 0.09 |
| QAQVSTVQN | | | | | QAQTLAVQN | | | | |
| PLNGAVHLYA | 322 | 0.602 | 1.518 | 12.9 | PLNGAVHLYA | 821 | 0.772 | 0.448 | 91.93 |
| QAQSAQVQN | | | | | QAQSSLVQN | | | | |
| PLNGAVHLYA | 323 | 0.838 | 1.508 | 8.13 | ALNGAVHLYA | 822 | 0.203 | 0.448 | 0.37 |
| QAQNTPVQN | | | | | QAQTGWLQN | | | | |
| PLNGAVHLYA | 324 | 0.381 | 1.495 | 0.09 | TLNGAVHLYA | 823 | 0.736 | 0.448 | 0.09 |
| QAQVSSVQT | | | | | QAQTLQVQN | | | | |
| PLNGAVHLYA | 325 | 0.284 | 1.492 | 0.09 | PLNGAVHLYD | 824 | 0.439 | 0.448 | 0.09 |
| QAQTVSVKN | | | | | QAQVQSVQN | | | | |
| PLNGAVHLYA | 326 | 0.710 | 1.488 | 9.21 | SLNGAVHLYA | 825 | 0.442 | 0.447 | 0.09 |
| QPQTGLVQN | | | | | QAQVTGVQN | | | | |
| PLNGAVHLYA | 327 | 0.287 | 1.487 | 621.2 | QLNGAVHLYA | 826 | 0.849 | 0.444 | 0.09 |
| QAQTGSVQN | | | | | QAQSAVVQN | | | | |
| SLNGAVHLYA | 328 | 0.437 | 1.485 | 0.09 | PLNGVVHLYA | 827 | 0.410 | 0.444 | 0.09 |
| QAQTLPVQN | | | | | QAQTGWVQT | | | | |
| PLNGAVHLYA | 329 | 0.440 | 1.478 | 0.09 | PLNGAVHLYA | 828 | 0.373 | 0.444 | 0.61 |
| QAQTGGAQN | | | | | QAQTAWVKN | | | | |
| SLNGAVHLYA | 330 | 0.618 | 1.477 | 0.09 | TLNGAVHLYA | 829 | 0.557 | 0.443 | 0.14 |
| QAQTAQVQN | | | | | QAQTLPVQN | | | | |
| PLNGAVHLYA | 331 | 0.684 | 1.466 | 14.21 | ALNGAVHLYA | 830 | 0.683 | 0.442 | 0.09 |
| QAQTAVVQN | | | | | QAQTTGVQN | | | | |
| PLNGAVHLYA | 332 | 0.533 | 1.456 | 17.71 | PLNGAVHLYA | 831 | 0.466 | 0.442 | 0.09 |
| QAQRLGVQN | | | | | KAQTMAVQN | | | | |
| PLNGSVHLYA | 333 | 0.207 | 1.453 | 0.37 | PLNGAVHLYA | 832 | 0.636 | 0.442 | 10.61 |
| QAQTGWVQH | | | | | QAQTYSVQN | | | | |
| PLNGAVHLYA | 334 | 0.489 | 1.452 | 21.26 | PLNGCVHLYA | 833 | 0.285 | 0.441 | 0.75 |
| QAQRTLVQN | | | | | QAQTGWVQN | | | | |
| SLNGAVHLYA | 335 | 0.559 | 1.451 | 0.09 | PLNGAVHLYA | 834 | 0.491 | 0.440 | 0.09 |
| QAQTMAVQN | | | | | QAQLAAVQT | | | | |
| PLNGAVHLYA | 336 | 0.707 | 1.447 | 10.23 | PLNGAVHLYA | 835 | 0.734 | 0.440 | 0.14 |
| QAQTQMVQN | | | | | QAQTALVKN | | | | |
| PLNGAVHLYA | 337 | 0.663 | 1.442 | 10.52 | PLNGAVHLYA | 836 | 0.392 | 0.439 | 0.14 |
| QAQITPVQN | | | | | KAQTVAVQN | | | | |
| PLNGAVHLYA | 338 | 0.199 | 1.434 | 0.09 | PLNGAVHLYA | 837 | 0.225 | 0.439 | 0.37 |
| QAQTVWVQK | | | | | HAQTGWVQT | | | | |
| PLNGAVHLYA | 339 | 0.584 | 1.423 | 13.97 | PLNGGVHLYA | 838 | 0.649 | 0.439 | 0.09 |
| QAQRSAVQN | | | | | QAQRGSVQN | | | | |
| PLNGAVHLYA | 340 | 0.332 | 1.420 | 99.87 | PLNGAFHLYA | 839 | 0.462 | 0.436 | 0.14 |
| QAQTASVQN | | | | | QAQTGGVQN | | | | |
| PLNGAVHLYA | 341 | 0.536 | 1.417 | 11.22 | PLNGAVHLYA | 840 | 0.496 | 0.436 | 0.09 |
| QAQTMGVQN | | | | | LAQTSPVQN | | | | |
| PLNGAVHLYA | 342 | 0.256 | 1.414 | 0.28 | PLNGAVHLYA | 841 | 0.225 | 0.435 | 2.9 |
| QAQTGGVQH | | | | | QAQTGWVQY | | | | |
| PLNGAVHLYA | 343 | 0.415 | 1.412 | 36.36 | PLNGAVHLYA | 842 | 0.538 | 0.432 | 0.19 |
| QAQVQSVQN | | | | | QAQTLPVQT | | | | |
| PLNGAVHLYA | 344 | 0.324 | 1.411 | 500.1 | PLNGAVHLYS | 843 | 0.499 | 0.432 | 0.23 |
| QAQTGGVQN | | | | | QAQTGWFQN | | | | |
| SLNGAVHLYA | 345 | 0.471 | 1.411 | 0.09 | PLNGAVHLYA | 844 | 0.696 | 0.432 | 0.33 |
| QAQTAPVQN | | | | | QAQTGLVQH | | | | |
| PLNGAVHLYA | 346 | 0.680 | 1.410 | 16.68 | PLNGAVHLYA | 845 | 0.628 | 0.432 | 0.98 |
| QAQISPVQN | | | | | QAQTPTVQN | | | | |
| PLNGAVHLYA | 347 | 0.345 | 1.409 | 0.09 | PLYGAVHLYA | 846 | 0.274 | 0.429 | 0.28 |
| QPQTGWVKN | | | | | QAQTAWVQN | | | | |
| PLNGAVHLYA | 348 | 0.242 | 1.409 | 0.14 | PLNGAVHLYA | 847 | 0.275 | 0.428 | 0.23 |
| QAQTGSAQN | | | | | KAQTASVQN | | | | |
| PLNGAVHLYA | 349 | 0.474 | 1.393 | 2.62 | PLNGAVHLYA | 848 | 0.285 | 0.428 | 0.19 |
| QAQTGWAQN | | | | | QAQTASVQK | | | | |
| PLNGAVHLYA | 350 | 0.383 | 1.392 | 0.09 | PLDGSVHLYA | 849 | 0.641 | 0.424 | 0.09 |
| QAQTMSVQT | | | | | QAQTAWVQN | | | | |
| PLNGSVHLYA | 351 | 0.649 | 1.391 | 12.29 | PLNGADHLYA | 850 | 0.540 | 0.423 | 0.09 |
| QAQTAWVQN | | | | | QAQTSSVQN | | | | |
| PLNGAVHLYA | 352 | 0.410 | 1.387 | 8.13 | PLNGAVHLYA | 851 | 0.594 | 0.422 | 0.09 |
| QAQVGGVQN | | | | | QAQTSPVQI | | | | |
| PLNGAVHLYA | 353 | 0.496 | 1.387 | 0.09 | PLNGAVHLYA | 852 | 0.661 | 0.420 | 40 |
| KAQTSPVQN | | | | | QAQIGWVQN | | | | |
| PLNGAVHLYA | 354 | 0.768 | 1.381 | 0.09 | PLNGAVHLYA | 853 | 0.209 | 0.419 | 0.09 |
| QAQLAPVQT | | | | | KAQTSTVQN | | | | |
| PLDGAVHLYA | 355 | 0.901 | 1.375 | 0.09 | PLNGAVHRYA | 854 | 0.237 | 0.419 | 0.19 |
| QAQTALVQN | | | | | QAQTGWVQT | | | | |
| PLNGAVHLYA | 356 | 0.594 | 1.368 | 58.98 | PLNGAVHLYD | 855 | 0.268 | 0.419 | 0.14 |
| QAQTALVQN | | | | | QAQTSTVQN | | | | |
| PLNGAVHLYA | 357 | 0.470 | 1.366 | 19.63 | QLNGAVHLYA | 856 | 0.568 | 0.418 | 69.31 |
| QAQLAGVQN | | | | | QAQTGLVQN | | | | |
| PLNGAVHLYA | 358 | 0.613 | 1.365 | 9.53 | PLNGAVNLYA | 857 | 0.864 | 0.417 | 0.09 |
| QAQRTAVQN | | | | | QAQLGPVQN | | | | |
| PLNGAVHLYA | 359 | 0.540 | 1.363 | 22.15 | PLNGAVHLYA | 858 | 0.400 | 0.417 | 0.23 |
| QAQRSPVQN | | | | | QAQTGWDKN | | | | |
| PLNGAVHLYA | 360 | 0.513 | 1.360 | 39.82 | PLNGALHLYA | 859 | 0.432 | 0.416 | 0.14 |
| QAQTLAVQN | | | | | QAQTGWVKN | | | | |
| PLNGAVHLYA | 361 | 0.322 | 1.351 | 5.42 | PLNGNVHLYA | 860 | 0.698 | 0.414 | 0.09 |
| QAQLAHVQN | | | | | HAQTGWVQN | | | | |
| PLNGAVHLYA | 362 | 0.352 | 1.348 | 36.69 | PLNGAVHLYA | 861 | 0.861 | 0.414 | 8.23 |
| QAQTSLVQN | | | | | QAQKSSVQN | | | | |
| PLNGAVHLYA | 363 | 0.548 | 1.347 | 30.75 | PLNGAVHLYA | 862 | 0.691 | 0.412 | 30.7 |
| QAQRLSVQN | | | | | QAQTGYVQN | | | | |
| PLNGAVHLYD | 364 | 0.406 | 1.344 | 0.09 | PVNGAVHLYA | 863 | 0.456 | 0.412 | 0.09 |
| QAQLSPVQN | | | | | QAQVGSVQN | | | | |
| PLNGAVHLYA | 365 | 0.424 | 1.339 | 13.97 | PLNGGVHLYA | 864 | 0.536 | 0.411 | 1.17 |
| QAQLMGVQN | | | | | QAQTGWVKN | | | | |
| PLNGSVHLYA | 366 | 0.147 | 1.336 | 1.03 | PLNGAVHLYA | 865 | 0.627 | 0.410 | 0.09 |
| QAQTGWVQT | | | | | QAQRGWVQT | | | | |
| PLNGAVHLYA | 367 | 0.588 | 1.335 | 11.26 | PLNGAVNLYA | 866 | 0.729 | 0.410 | 0.09 |
| QAQSMQVQN | | | | | QAQRSLVQN | | | | |
| PLNGGVHLYA | 368 | 0.483 | 1.334 | 0.14 | PINGAVHLYA | 867 | 0.358 | 0.410 | 0.51 |
| QAQTGWFQN | | | | | QAQTGWDQN | | | | |
| PLNGAVHLYA | 369 | 0.834 | 1.326 | 14.02 | PLNGNVHLYA | 868 | 0.536 | 0.410 | 0.23 |
| QAQTQTVQN | | | | | QAQTGWVQT | | | | |
| PLDGAVHLYS | 370 | 0.860 | 1.323 | 9.44 | PLNGAVHLYA | 869 | 0.265 | 0.409 | 0.23 |
| QAQTGWVQN | | | | | KAQTGWFQN | | | | |
| PLNGAVHLYA | 371 | 0.325 | 1.319 | 0.14 | PLNGAVHLYA | 870 | 0.421 | 0.408 | 0.09 |
| QAQTGWEQN | | | | | QEQTSTVQN | | | | |
| PLNGAVHLYA | 372 | 0.487 | 1.317 | 29.44 | PLNGAVHLYA | 871 | 0.281 | 0.406 | 0.14 |
| QAQVGSVQN | | | | | QAQTGGVEN | | | | |
| PLNGAVHLYA | 373 | 0.339 | 1.317 | 24.86 | PLNGAVHLYS | 872 | 0.831 | 0.406 | 0.09 |
| QAQVSGVQN | | | | | QAQTGWVQI | | | | |
| PLNGAVHLYA | 374 | 0.767 | 1.312 | 13.04 | SLNGAVHLYA | 873 | 0.480 | 0.406 | 0.09 |
| QAQVMAVQN | | | | | QAQTGLVQK | | | | |
| PLNGAVHLYA | 375 | 0.814 | 1.309 | 23.37 | PLNGAVHLYA | 874 | 0.605 | 0.403 | 0.09 |
| QAQIGGVQN | | | | | QAQTGCVRN | | | | |
| PLNGAVHLYA | 376 | 0.841 | 1.301 | 5.47 | PLNGADHLYA | 875 | 0.758 | 0.402 | 0.09 |
| QAQIAGVQN | | | | | QAQVTPVQN | | | | |
| PLNGAVHLYA | 377 | 0.200 | 1.297 | 0.09 | PLNGAVHLYA | 876 | 0.129 | 0.400 | 0.28 |
| KAQTVSVQN | | | | | PAQTGWVQT | | | | |
| PLNGAVHLYS | 378 | 0.838 | 1.297 | 4.3 | PLNGDVHLYA | 877 | 0.900 | 0.400 | 0.09 |
| QAQTGRVQN | | | | | QAQTSAVQN | | | | |
| PLNGAVHLYA | 379 | 0.826 | 1.296 | 7.34 | TLNGAVHLYA | 878 | 0.635 | 0.399 | 0.09 |
| QAQLSHVQN | | | | | QAQSSLVQN | | | | |
| PLNGAVHLYA | 380 | 0.865 | 1.288 | 4.77 | SLNGAVHLYA | 879 | 0.645 | 0.399 | 0.14 |
| QAQVQTVQN | | | | | QAQRSVVQN | | | | |
| SLDGAVHLYA | 381 | 0.875 | 1.287 | 61.08 | SLNGAVHLYA | 880 | 0.817 | 0.397 | 0.33 |
| QAQTGWVQN | | | | | QAQTGWVQS | | | | |
| PLNGAVHLYA | 382 | 0.326 | 1.287 | 0.09 | PVNGAVHLYA | 881 | 0.800 | 0.397 | 0.14 |
| QPQTGWDQN | | | | | QAQTGWVQS | | | | |
| PLNGAVHLYA | 383 | 0.564 | 1.284 | 11.36 | PLNGAVHLYA | 882 | 0.619 | 0.396 | 0.09 |
| QAQRNSVQN | | | | | QAQLSPVQS | | | | |
| PLNGAVHLYA | 384 | 0.533 | 1.283 | 57.16 | PLNGAVHLYA | 883 | 0.285 | 0.395 | 0.09 |
| QAQTLPVQN | | | | | QPQTGWLQN | | | | |
| PLNGAVHLYA | 385 | 0.569 | 1.282 | 5.09 | PLNGAVNLYA | 884 | 0.719 | 0.394 | 0.14 |
| QAQTKQVQN | | | | | QAQSAPVQN | | | | |
| PLNGSVHLYA | 386 | 0.144 | 1.279 | 972 | PLNGTVHLYA | 885 | 0.384 | 0.394 | 0.09 |
| QAQTGWVQN | | | | | QAQTGWVPN | | | | |
| PLNGAVHLYA | 387 | 0.593 | 1.278 | 11.17 | PVDGAVHLYA | 886 | 0.792 | 0.394 | 0.23 |
| QAQLGQVQN | | | | | QAQTGSVQN | | | | |
| SLNGAVHLYA | 388 | 0.684 | 1.277 | 19.35 | PLNGAVHLYD | 887 | 0.261 | 0.393 | 0.09 |
| QAQTGRVQN | | | | | QAQTAAVQN | | | | |
| PLDGAVHLYA | 389 | 0.647 | 1.275 | 263.1 | PLKGAVHLYA | 888 | 0.352 | 0.392 | 0.09 |
| QAQTGWVQN | | | | | QAQTSTVQN | | | | |
| PLNGSVHLYA | 390 | 0.181 | 1.273 | 0.19 | PLNGAVHLYA | 889 | 0.730 | 0.392 | 0.14 |
| QAQTGWAQN | | | | | QAQTGPVQT | | | | |
| TLNGAVHLYA | 391 | 0.405 | 1.266 | 0.09 | PLNGAVHLYA | 890 | 0.432 | 0.392 | 0.14 |
| QAQVASVQN | | | | | QAQTVGVQK | | | | |
| PLNGAVHLYA | 392 | 0.733 | 1.261 | 2.85 | PLNGAVNLYA | 891 | 0.451 | 0.391 | 0.14 |
| QAQNMQVQN | | | | | QAQTSTVQN | | | | |
| PLNGAVHLYA | 393 | 0.863 | 1.258 | 3.18 | PLNGAVHLYA | 892 | 0.414 | 0.390 | 0.09 |
| QAQNVQVQN | | | | | RAQTVSVQN | | | | |
| PLNGAVHLYA | 394 | 0.299 | 1.250 | 0.14 | PLNGAVHLYA | 893 | 0.431 | 0.390 | 0.09 |
| QAQTGSVQI | | | | | QAQTASGQN | | | | |
| PLNGTVHLYA | 395 | 0.840 | 1.249 | 15.75 | PLNGAVHLYA | 894 | 0.631 | 0.390 | 20.28 |
| QAQTGGVQN | | | | | QAQSVSVQN | | | | |
| PLNGAVHLYA | 396 | 0.805 | 1.248 | 0.09 | PLNGAVHLYA | 895 | 0.724 | 0.389 | 0.09 |
| KAQVSPVQN | | | | | QAQSGPVQT | | | | |
| PLNGAVHLYA | 397 | 0.765 | 1.241 | 6.4 | QLNGAVHLYA | 896 | 0.578 | 0.389 | 0.47 |
| QAQRGGVQN | | | | | QAQTGWGQN | | | | |
| PLNGGVHLYA | 398 | 0.335 | 1.240 | 25.94 | PLNGAVHLYA | 897 | 0.670 | 0.386 | 0.09 |
| QAQTGLVQN | | | | | QAQVMSVKN | | | | |
| PLNGAVHLYA | 399 | 0.542 | 1.237 | 33.32 | PLNGTVHLYA | 898 | 0.557 | 0.386 | 0.09 |
| QAQVMSVQN | | | | | KAQTGSVQN | | | | |
| PLNGAVHLYA | 400 | 0.401 | 1.235 | 15.05 | PLNGAVNLYA | 899 | 0.527 | 0.385 | 0.09 |
| QAQTTGVQN | | | | | QAQTSLVQN | | | | |
| PLNGAVHLYA | 401 | 0.375 | 1.229 | 0.09 | PINGAVHLYA | 900 | 0.867 | 0.385 | 0.14 |
| QAQLSPVQK | | | | | QAQTLSVQN | | | | |
| SLNGAVHLYA | 402 | 0.677 | 1.226 | 0.09 | PLNGAVHLYA | 901 | 0.458 | 0.384 | 0.09 |
| QAQTAAVQN | | | | | QAQLGSVQK | | | | |
| PINGAVHLYA | 403 | 0.351 | 1.223 | 0.14 | TLNGAVHLYA | 902 | 0.728 | 0.383 | 0.09 |
| QAQTSPVQN | | | | | QAQTAMVQN | | | | |
| PLNGAVHLYA | 404 | 0.691 | 1.220 | 15.28 | PLNGAVHLYA | 903 | 0.775 | 0.383 | 0.09 |
| QAQLSRVQN | | | | | QAHLSSVQN | | | | |
| PLNGAVHLYA | 405 | 0.259 | 1.213 | 0.09 | PLNGAVHLYA | 904 | 0.552 | 0.380 | 0.09 |
| QAQVSSVQK | | | | | KAQVMSVQN | | | | |
| PLNGAVHLYA | 406 | 0.768 | 1.212 | 0.09 | PLNGAVHLYA | 905 | 0.569 | 0.380 | 0.09 |
| QAQTAPVQT | | | | | QAQTGLVLN | | | | |
| PLNGAVHLYA | 407 | 0.740 | 1.206 | 7.9 | PLNGGVHLYA | 906 | 0.491 | 0.378 | 1.03 |
| QAQMAPVQN | | | | | QAQTGWVQK | | | | |
| PLNGAVHLYA | 408 | 0.499 | 1.202 | 7.06 | PLNGAVHLYA | 907 | 0.250 | 0.378 | 0.61 |
| QAQILGVQN | | | | | KAQTGWVQK | | | | |
| PLNGAVHLYA | 409 | 0.216 | 1.198 | 0.14 | PLNGAVLLYA | 908 | 0.482 | 0.378 | 0.09 |
| QAQTASVQT | | | | | QAQTASVQN | | | | |
| PLNGAVHLYA | 410 | 0.267 | 1.196 | 0.23 | PLNGDVHLYA | 909 | 0.507 | 0.378 | 0.09 |
| QAQTGSLQN | | | | | QAQTMAVQN | | | | |
| PLNGAVHLYA | 411 | 0.638 | 1.196 | 28.79 | PLNGAVHLYA | 910 | 0.258 | 0.377 | 0.09 |
| QAQTGTVQN | | | | | KAQTAAVQN | | | | |
| PLNGGVHLYA | 412 | 0.578 | 1.193 | 565.1 | PLNGAVHLYA | 911 | 0.549 | 0.377 | 763.5 |
| QAQTGWVQN | | | | | QAQTGLVQN | | | | |
| PLNGAVHLYA | 413 | 0.237 | 1.183 | 0.89 | PLNGDVHLYA | 912 | 0.699 | 0.376 | 0.14 |
| QAQTGSVQT | | | | | QAQSSPVQN | | | | |
| PLNGAVHLYA | 414 | 0.353 | 1.171 | 0.09 | PLNGAVHLYA | 913 | 0.832 | 0.376 | 14.96 |
| QAQTSSVQT | | | | | QAQTSNVQN | | | | |
| PLNGAVHLYA | 415 | 0.414 | 1.167 | 10.84 | ALDGAVHLYA | 914 | 0.702 | 0.376 | 0.47 |
| QAQTSHVQN | | | | | QAQTGSVQN | | | | |
| PLNGGVHLYA | 416 | 0.561 | 1.166 | 0.28 | PLNGAVHLYS | 915 | 0.848 | 0.375 | 0.09 |
| QAQTGWDQN | | | | | QAQTSSVQN | | | | |
| PLNGAVHLYA | 417 | 0.753 | 1.165 | 3.55 | PLKGAVHLYA | 916 | 0.390 | 0.373 | 0.19 |
| QAQRIGVQN | | | | | QAQLSPVQN | | | | |
| TLNGAVHLYA | 418 | 0.771 | 1.164 | 0.09 | LLNGAVHLYA | 917 | 0.349 | 0.373 | 0.09 |
| QAQTTSVQN | | | | | QAQTVSVQN | | | | |
| PLNGAVHLYA | 419 | 0.347 | 1.158 | 0.14 | PLNGGVHLYA | 918 | 0.571 | 0.373 | 0.37 |
| QAQTGWGQT | | | | | QAQTGWVQI | | | | |
| PLNGAVHLYA | 420 | 0.549 | 1.158 | 14.3 | PLNGAVHLYS | 919 | 0.863 | 0.372 | 0.14 |
| QAQSAMVQN | | | | | QAQTGWVRN | | | | |
| PLNGAVHLYA | 421 | 0.510 | 1.156 | 23.23 | PLNGAVHLYA | 920 | 0.426 | 0.371 | 0.09 |
| QAQTSMVQN | | | | | QAQTGWGHN | | | | |
| PLNGAVHLYA | 422 | 0.781 | 1.148 | 13.09 | PHNGAVHLYA | 921 | 0.849 | 0.371 | 0.09 |
| QAQSMGVQN | | | | | QAQTTSVQN | | | | |
| PLNGAVHLYA | 423 | 0.568 | 1.145 | 27.62 | PLNRAVHLYA | 922 | 0.436 | 0.371 | 0.09 |
| QAQSMSVQN | | | | | QAQTGWVQK | | | | |
| PLNGAVHLYA | 424 | 0.442 | 1.145 | 94.03 | PLNGAVHLYD | 923 | 0.509 | 0.371 | 0.09 |
| QAQTSSVQN | | | | | QAQRASVQN | | | | |
| PLNGAVHLYA | 425 | 0.620 | 1.143 | 30.52 | PLNGAVHLYS | 924 | 0.800 | 0.370 | 584.7 |
| QAQTSGVQN | | | | | QAQTGWVQN | | | | |
| PLNGAVHLYA | 426 | 0.557 | 1.141 | 22.9 | PLNGSVHLYA | 925 | 0.401 | 0.370 | 0.42 |
| QAQTGAVQN | | | | | QAQTGTVQN | | | | |
| PLNGAVHLYA | 427 | 0.627 | 1.140 | 14.02 | PLNGAVHLYD | 926 | 0.752 | 0.370 | 0.09 |
| QAQVNSVQN | | | | | QAQTSGVQN | | | | |
| PLNGAVHLYA | 428 | 0.804 | 1.139 | 12.48 | PLNGAVHLYA | 927 | 0.389 | 0.368 | 0.19 |
| QAQVAGVQN | | | | | QAKTGWFQN | | | | |
| PLNGAVHLYA | 429 | 0.710 | 1.139 | 27.01 | KLDGAVHLYA | 928 | 0.763 | 0.367 | 0.14 |
| QAQIGSVQN | | | | | QAQTGLVQN | | | | |
| PLDGAVHVYA | 430 | 0.818 | 1.132 | 9.49 | PLNGAVHLYA | 929 | 0.581 | 0.363 | 9.39 |
| QAQTGWVQN | | | | | QAQSQMVQN | | | | |
| TLNGAVHLYA | 431 | 0.474 | 1.131 | 0.09 | TLNGAVHLYA | 930 | 0.706 | 0.363 | 0.09 |
| QAQTTPVQN | | | | | QAQTSVVQN | | | | |
| PLNGAVHLYA | 432 | 0.442 | 1.131 | 41.64 | PLNGAVHLYA | 931 | 0.449 | 0.361 | 0.09 |
| QAQLGSVQN | | | | | KAQTGTVQN | | | | |
| PLNGAVHLYA | 433 | 0.807 | 1.130 | 7.06 | PLNGAVHLYA | 932 | 0.440 | 0.361 | 0.09 |
| QAQVNGVQN | | | | | QAQTVSVHN | | | | |
| QLNGAVHLYA | 434 | 0.857 | 1.127 | 0.19 | PLNGAVHLYA | 933 | 0.559 | 0.361 | 0.19 |
| QAQLSSVQN | | | | | QAQLSSVQT | | | | |
| PLNGAVHLYA | 435 | 0.652 | 1.127 | 7.62 | PVNGAVHLYA | 934 | 0.791 | 0.359 | 0.28 |
| QAQLTAVQN | | | | | QAQTGWFQN | | | | |
| PLNGAVHLYA | 436 | 0.892 | 1.125 | 3.22 | PLNGAVHLYA | 935 | 0.266 | 0.356 | 0.09 |
| QAQVQNVQN | | | | | QAQTASVRN | | | | |
| PLNGAVHLYA | 437 | 0.737 | 1.117 | 14.63 | PLNGDVHLYA | 936 | 0.410 | 0.355 | 0.09 |
| QAQTKSVQN | | | | | QAQTSTVQN | | | | |
| PLNGAVHLYA | 438 | 0.847 | 1.117 | 16.64 | PLNGAVHLYA | 937 | 0.477 | 0.354 | 0.09 |
| QAQSVGVQN | | | | | KAQLGSVQN | | | | |
| QLNGAVHLYA | 439 | 0.413 | 1.116 | 0.09 | PINGAVHLYA | 938 | 0.774 | 0.354 | 0.09 |
| QAQLGPVQN | | | | | QAQLVPVQN | | | | |
| PLNGAVHLYA | 440 | 0.274 | 1.107 | 0.47 | PLNGAVHHYA | 939 | 0.833 | 0.354 | 0.09 |
| QAQTAWVQT | | | | | QAQLGPVQN | | | | |
| PLNGAVHLYA | 441 | 0.651 | 1.099 | 11.54 | PLNGAVHLYA | 940 | 0.387 | 0.353 | 0.19 |
| QAQNASVQN | | | | | PAQTGWVQH | | | | |
| PLNGAVHLYA | 442 | 0.661 | 1.098 | 45.57 | PLNGAVHLYA | 941 | 0.696 | 0.353 | 0.56 |
| QAQTSAVQN | | | | | QAQVPAVQN | | | | |
| ALNGAVHLYA | 443 | 0.530 | 1.097 | 0.09 | PLNGAVNLYA | 942 | 0.774 | 0.353 | 0.09 |
| QAQLAAVQN | | | | | QAQRLSVQN | | | | |
| PLNGAVHLYD | 444 | 0.721 | 1.097 | 0.09 | PLNGAVHLYA | 943 | 0.534 | 0.352 | 0.23 |
| QAQVSPVQN | | | | | QAQTGRVQK | | | | |
| PLNGAVHLYA | 445 | 0.442 | 1.095 | 0.09 | PLNGAVLLYA | 944 | 0.370 | 0.352 | 0.09 |
| QAQTMSVKN | | | | | QAQTVSVQN | | | | |
| PLNGAVHLYA | 446 | 0.650 | 1.092 | 7.71 | PLNGAVHLYA | 945 | 0.510 | 0.351 | 11.4 |
| QAQTANVQN | | | | | QAQAMSVQN | | | | |
| PLNGAVHLYA | 447 | 0.358 | 1.092 | 5.19 | PLNGAVHLYA | 946 | 0.451 | 0.351 | 0.23 |
| QAQTGWFQN | | | | | QAQTAWVHN | | | | |
| PLNGNVHLYA | 448 | 0.392 | 1.090 | 74.03 | PLNGAVHLYA | 947 | 0.615 | 0.350 | 0.09 |
| QAQTGWVQN | | | | | QPQTGWVRN | | | | |
| PLNGSVHLYA | 449 | 0.195 | 1.087 | 0.23 | PLNGAVHLYA | 948 | 0.548 | 0.350 | 0.09 |
| QAQTGWVQS | | | | | QEQTGWLQN | | | | |
| PLNGAVHLYA | 450 | 0.279 | 1.081 | 0.09 | PLNGAVHLYA | 949 | 0.535 | 0.348 | 0.09 |
| QAQTGGVLN | | | | | KAQTSAVQN | | | | |
| PLNGAVHLYA | 451 | 0.888 | 1.081 | 16.45 | PLNGSVHLYA | 950 | 0.126 | 0.348 | 0.98 |
| QAQLTSVQN | | | | | QAQTVWVQN | | | | |
| PLNGAVHLYA | 452 | 0.176 | 1.079 | 19.3 | PLNGTVHLYA | 951 | 0.330 | 0.347 | 0.33 |
| QAQTGWVQT | | | | | QAQTGWFQN | | | | |
| PLNGAVHLYA | 453 | 0.804 | 1.078 | 10.7 | PLNGAVNLYA | 952 | 0.375 | 0.347 | 0.23 |
| QAQRSQVQN | | | | | QAQVASVQN | | | | |
| PLNGAVHIYA | 454 | 0.840 | 1.074 | 0.09 | PLNGAVHLYA | 953 | 0.674 | 0.347 | 0.19 |
| QAQVSPVQN | | | | | QAQTGLVRN | | | | |
| PLNGSVHLYA | 455 | 0.130 | 1.062 | 0.37 | PLNGAVNLYA | 954 | 0.587 | 0.346 | 0.09 |
| QAQTGWFQN | | | | | QAQLSTVQN | | | | |
| PLNGAVHLYA | 456 | 0.863 | 1.060 | 3.13 | PLNGAVHLYA | 955 | 0.721 | 0.346 | 0.09 |
| QAQRIPVQN | | | | | KAQTQPVQN | | | | |
| QLNGAVHLYA | 457 | 0.718 | 1.054 | 0.09 | PLNGTVHLYA | 956 | 0.382 | 0.346 | 0.33 |
| QAQLVPVQN | | | | | QAQTGWGQN | | | | |
| PLNGAVHLYA | 458 | 0.198 | 1.052 | 2.06 | PLNGAVHLYA | 957 | 0.453 | 0.345 | 0.09 |
| QAQTGWVQD | | | | | QAQRTLVQT | | | | |
| PLNGAVHLYA | 459 | 0.357 | 1.051 | 0.09 | PLNGAVHLYA | 958 | 0.157 | 0.345 | 0.61 |
| KAQVSSVQN | | | | | QAQTGSIQN | | | | |
| PLNGAVHLYA | 460 | 0.721 | 1.051 | 11.54 | QLNGAVHLYA | 959 | 0.574 | 0.344 | 1.4 |
| QAQRVEVQN | | | | | QAQTGWDQN | | | | |
| PLNGAVHLYA | 461 | 0.553 | 1.048 | 56.6 | PLNGAVHLYA | 960 | 0.599 | 0.344 | 0.14 |
| QAQVLPVQN | | | | | QAQLSSVKN | | | | |
| PLNGSVHLYA | 462 | 0.194 | 1.044 | 0.28 | QLNGAVHLYA | 961 | 0.451 | 0.343 | 1.45 |
| QAQTGWVRN | | | | | QAQTVSVQN | | | | |
| PLNGTVHLYA | 463 | 0.648 | 1.040 | 0.09 | PLNGAVHLYA | 962 | 0.726 | 0.343 | 0.09 |
| QAQSSPVQN | | | | | QAQTLQVQK | | | | |
| PLNGAVHLYA | 464 | 0.301 | 1.039 | 0.42 | TLNGAVHLYA | 963 | 0.573 | 0.343 | 0.14 |
| QAQTGGVQK | | | | | QAQVLPVQN | | | | |
| PLNGAVHLYA | 465 | 0.727 | 1.039 | 14.63 | PLNGAVHLYA | 964 | 0.756 | 0.342 | 0.09 |
| QAQSVAVQN | | | | | QAQVGSVKN | | | | |
| QLNGAVHLYA | 466 | 0.815 | 1.030 | 0.09 | PLNGAVHLYA | 965 | 0.744 | 0.341 | 0.09 |
| QAQLSGVQN | | | | | QAQLAPLQN | | | | |
| PLNGAVHLYA | 467 | 0.384 | 1.026 | 11.26 | QLNGAVHLYA | 966 | 0.716 | 0.341 | 0.09 |
| QAQLQQVQN | | | | | QAQTGSVKN | | | | |
| PLNGAVHLYA | 468 | 0.547 | 1.025 | 32.06 | PLNGAVHHYA | 967 | 0.620 | 0.341 | 0.09 |
| QAQLSTVQN | | | | | QAQRSTVQN | | | | |
| PLNGAVHLYA | 469 | 0.813 | 1.025 | 18.09 | QLNGSVHLYA | 968 | 0.266 | 0.341 | 0.23 |
| QAQSAAVQN | | | | | QAQTGRVQN | | | | |
| SLNGAVHLYA | 470 | 0.774 | 1.014 | 0.14 | TLNGAVHLYA | 969 | 0.818 | 0.340 | 0.09 |
| QAQVSAVQN | | | | | QAQVKPVQN | | | | |
| PLNGAVHLYA | 471 | 0.432 | 1.013 | 20.47 | PLNGTVHLYA | 970 | 0.784 | 0.339 | 24.58 |
| QAQRTSVQN | | | | | QAQTGLVQN | | | | |
| PLNGAVHLYA | 472 | 0.877 | 1.012 | 5.47 | PLNGAVHLYA | 971 | 0.396 | 0.338 | 0.65 |
| QAQTQNVQN | | | | | QAQTPGVQN | | | | |
| PLNGAVHLYA | 473 | 0.877 | 1.007 | 4.81 | PINGAVHLYA | 972 | 0.713 | 0.338 | 0.28 |
| QAQVNAVQN | | | | | QAQTSSVQN | | | | |
| PLNGAVHLYA | 474 | 0.585 | 1.006 | 0.09 | PLNGAVHLYA | 973 | 0.428 | 0.337 | 0.09 |
| QAQTVAVQT | | | | | QAQLSAVQT | | | | |
| PLNGAVHLYA | 475 | 0.487 | 1.005 | 20.75 | PLNGAVHLYS | 974 | 0.446 | 0.337 | 0.47 |
| QAQLMSVQN | | | | | QAQTGWDQN | | | | |
| PLNGAVHLYA | 476 | 0.179 | 1.000 | 15655 | PLNCAVHLYA | 975 | 0.856 | 0.336 | 14.39 |
| QAQTGWVQN | | | | | QAQTGWVQN | | | | |
| PLNGAVHLYA | 477 | 0.354 | 0.999 | 0.09 | PLNGAVNLYA | 976 | 0.624 | 0.336 | 0.14 |
| HAQTGWVQH | | | | | QAQTMPVQN | | | | |
| PLNGAVHLYA | 478 | 0.283 | 0.997 | 7.48 | PLNGAVHLYS | 977 | 0.283 | 0.335 | 0.09 |
| QAQTGWVQH | | | | | QAQTVAVQN | | | | |
| PLNGAVHHYA | 479 | 0.408 | 0.993 | 0.09 | PLNGTVHLYA | 978 | 0.366 | 0.334 | 0.79 |
| QAQTMSVQN | | | | | QAQTGWVKN | | | | |
| PLNGAVHLYA | 480 | 0.228 | 0.978 | 3.08 | PLNGGVHLYA | 979 | 0.465 | 0.333 | 0.37 |
| QAQTGWVQS | | | | | QAQTGWVHN | | | | |
| PLNGAVHLYD | 481 | 0.409 | 0.976 | 0.09 | QLNGAVHLYA | 980 | 0.558 | 0.332 | 1.59 |
| QAQTTPVQN | | | | | QAQTGWVQK | | | | |
| PLNGAVHLYA | 482 | 0.837 | 0.973 | 3.69 | PLNGAVQLYA | 981 | 0.524 | 0.331 | 0.09 |
| QAQTMMVQN | | | | | QAQTLAVQN | | | | |
| PLNGAVHLYA | 483 | 0.293 | 0.971 | 0.14 | PLNGTVHLYA | 982 | 0.695 | 0.331 | 0.09 |
| QAQTGGVQS | | | | | QAQVGSVQN | | | | |
| PLNGAVNLYA | 484 | 0.499 | 0.969 | 0.14 | PLNGGVHLYA | 983 | 0.764 | 0.330 | 17.67 |
| QAQTSPVQN | | | | | QAQTGGVQN | | | | |
| ALNGAVHLYA | 485 | 0.322 | 0.968 | 47.95 | PLKGAVHLYA | 984 | 0.474 | 0.330 | 0.09 |
| QAQTGLVQN | | | | | QAQVSQVQN | | | | |
| ALNGAVHLYA | 486 | 0.247 | 0.964 | 0.09 | PLNGAVHHYA | 985 | 0.526 | 0.330 | 0.09 |
| QAQVATVQN | | | | | QAQTQPVQN | | | | |
| PLNGAVHLYA | 487 | 0.258 | 0.959 | 0.23 | PLNGAVHLYA | 986 | 0.156 | 0.329 | 0.33 |
| QAQTGSFQN | | | | | QAPTGWVQT | | | | |
| PLNGAVHLYA | 488 | 0.422 | 0.958 | 27.01 | PLNGAVNLYA | 987 | 0.343 | 0.329 | 0.33 |
| QAQRSVVQN | | | | | QAQTMSVQN | | | | |
| PLNGAVHLYA | 489 | 0.224 | 0.957 | 0.65 | PLNGAVHLYA | 988 | 0.681 | 0.329 | 29.16 |
| QAQTGSVQK | | | | | QAQTGVVQN | | | | |
| PLNGAVHLYA | 490 | 0.503 | 0.954 | 16.31 | PLNGAVHLYA | 989 | 0.622 | 0.328 | 0.42 |
| QAQTQLVQN | | | | | QAQVPQVQN | | | | |
| PLNGAVHLYA | 491 | 0.252 | 0.954 | 0.19 | PHNGAVHLYA | 990 | 0.295 | 0.327 | 0.14 |
| QAQTGGVHN | | | | | QAQTMSVQN | | | | |
| PLNGAVHLYA | 492 | 0.328 | 0.953 | 11.92 | QLNGAVHLYA | 991 | 0.493 | 0.327 | 0.56 |
| QAQRTPVQN | | | | | QAQTGWLQN | | | | |
| PLNGAVHLYA | 493 | 0.852 | 0.952 | 5.33 | PLNGAVHLYA | 992 | 0.118 | 0.327 | 1.03 |
| QAQRQQVQN | | | | | QAQTGCVQK | | | | |
| PLNGAVHLYA | 494 | 0.321 | 0.952 | 0.19 | SLNGAVHLYA | 993 | 0.712 | 0.327 | 0.28 |
| QAQTGSVRN | | | | | QAQTSLVQN | | | | |
| PLNGAVHLYA | 495 | 0.758 | 0.946 | 11.87 | PLNGAVHLYA | 994 | 0.422 | 0.326 | 0.23 |
| QAQVQGVQN | | | | | QAQTRWVQT | | | | |
| TLNGAVHLYA | 496 | 0.854 | 0.942 | 0.14 | TLNGAVHLYA | 995 | 0.743 | 0.325 | 0.09 |
| QAQVSPVQN | | | | | QAQTVQVQN | | | | |
| PLNGAVHLYA | 497 | 0.205 | 0.942 | 0.23 | ALNGAVHLYA | 996 | 0.762 | 0.324 | 0.09 |
| QAQPGWVQT | | | | | QAQKGGVQN | | | | |
| PLNGAVHLYA | 498 | 0.407 | 0.941 | 17.25 | PLNGAVHLYD | 997 | 0.143 | 0.323 | 0.09 |
| QAQSTQVQN | | | | | QAQVSGVQN | | | | |
| PLNGSVHLYA | 499 | 0.247 | 0.939 | 0.09 | PLNGAVHLYA | 998 | 0.554 | 0.323 | 0.65 |
| QAQTGWVEN | | | | | QAQTGLDQN | | | | |
| PLNGAVHLYA | 500 | 0.267 | 0.934 | 22.29 | PLNGAVPLYA | 999 | 0.387 | 0.323 | 0.42 |
| QAQQSPVQN | | | | | QAQTGWVQT | | | | |
| PLNGAVHLYA | 501 | 0.517 | 0.934 | 8.23 | PLNGAVHLYA | 1000 | 0.414 | 0.323 | 0.09 |
| QAQRYSVQN | | | | | QAQVSSVHN | | | | |
| PLNGAVHLYA | 502 | 0.267 | 0.930 | 9.77 | TLNGAVHLYA | 1001 | 0.264 | 0.322 | 0.09 |
| QAQTGWDQN | | | | | QAQTNSVQN | | | | |
| PLNGAVHLYA | 503 | 0.774 | 0.930 | 4.67 | PLNGAGHLYA | 1002 | 0.479 | 0.321 | 0.09 |
| QAQTQRVQN | | | | | QAQLSPVQN | | | | |
| ALNGAVHLYA | 504 | 0.330 | 0.926 | 0.23 | HLNGAVHLYA | 1003 | 0.532 | 0.321 | 0.19 |
| QAQTGWVRN | | | | | QAQTGRVQN | | | | |
| PLNGAVHLYA | 505 | 0.370 | 0.923 | 171 | PLNGAVHLYD | 1004 | 0.872 | 0.320 | 0.09 |
| QPQTGWVQN | | | | | QAQTAMVQN | | | | |
| ALNGAVHLYA | 506 | 0.516 | 0.920 | 0.09 | PINGAVHLYA | 1005 | 0.646 | 0.320 | 0.33 |
| QAQVSGVQN | | | | | QAQTGWVQH | | | | |
| PLNGAVHLYA | 507 | 0.813 | 0.920 | 17.01 | PLNGAVQLYA | 1006 | 0.479 | 0.319 | 0.09 |
| QAQSAGVQN | | | | | QAQTLQVQN | | | | |
| PLNGAVHLYA | 508 | 0.734 | 0.918 | 0.09 | PLNGAVHLYA | 1007 | 0.323 | 0.318 | 0.28 |
| QAQSAPVQT | | | | | QAQKGWVQT | | | | |
| PLNGAVHLYA | 509 | 0.499 | 0.914 | 13.97 | PLNGAVHHYA | 1008 | 0.592 | 0.318 | 0.09 |
| QAQRQSVQN | | | | | QAQSTSVQN | | | | |
| PLNGAVHLYA | 510 | 0.591 | 0.906 | 20.42 | PLNGYVHLYA | 1009 | 0.187 | 0.317 | 2.99 |
| QAQSQPVQN | | | | | QAQTGWVQN | | | | |
| PLNGAVHLYA | 511 | 0.570 | 0.906 | 0.09 | PLNGAVHIYA | 1010 | 0.599 | 0.316 | 0.09 |
| QAQVASVKN | | | | | QAQVQSVQN | | | | |
| PLNGAVHLYA | 512 | 0.403 | 0.904 | 0.09 | PLIGAVHLYA | 1011 | 0.535 | 0.315 | 0.09 |
| QAQTAWVRN | | | | | QAQLSPVQN | | | | |
| SLNGAVHLYA | 513 | 0.491 | 0.904 | 0.09 | TLNGAVHLYA | 1012 | 0.774 | 0.315 | 0.09 |
| QAQTMQVQN | | | | | QAQLLPVQN | | | | |
| PLNGAVNLYA | 514 | 0.664 | 0.902 | 0.09 | PLNGAVHLYS | 1013 | 0.747 | 0.315 | 0.84 |
| QAQSSPVQN | | | | | QAQTGWVQT | | | | |
| PLNGAVHLYA | 515 | 0.318 | 0.901 | 0.23 | ALNGAVHLYA | 1014 | 0.444 | 0.315 | 0.14 |
| QAQTGGGQN | | | | | QAQTQLVQN | | | | |
| PLNGAVHLYD | 516 | 0.515 | 0.898 | 0.09 | PLNGAVHLYA | 1015 | 0.810 | 0.315 | 34.86 |
| QAQVASVQN | | | | | QAQSLPVQN | | | | |
| PLNGAVHLYA | 517 | 0.709 | 0.897 | 45.94 | PVNGAVHLYA | 1016 | 0.890 | 0.314 | 0.09 |
| QAQSTSVQN | | | | | QAQTGWVPN | | | | |
| PLNGTVHLYA | 518 | 0.403 | 0.894 | 0.23 | PLNGAVHLYA | 1017 | 0.247 | 0.313 | 0.19 |
| QAQTGWVQH | | | | | QAKTVSVQN | | | | |
| QLNGAVHLYA | 519 | 0.718 | 0.892 | 0.42 | PLNGAVHLYA | 1018 | 0.645 | 0.313 | 0.09 |
| QAQTSSVQN | | | | | QAQTTSVHN | | | | |
| PLDGAVHLYA | 520 | 0.613 | 0.892 | 0.09 | PVNGAVHLYA | 1019 | 0.765 | 0.313 | 939 |
| QAQTGWVHN | | | | | QAQTGWVQN | | | | |
| PLNGTVHLYA | 521 | 0.397 | 0.888 | 0.33 | PLNGAVHLYA | 1020 | 0.476 | 0.313 | 0.09 |
| QAQTGWVQK | | | | | QAHTGWVQI | | | | |
| PLNGAVHLYA | 522 | 0.369 | 0.888 | 20.28 | PLNGAVRLYA | 1021 | 0.611 | 0.313 | 0.09 |
| QAQVLGVQN | | | | | QAQTASVQN | | | | |
| PLNGAVHLYA | 523 | 0.640 | 0.887 | 5.7 | PLNGGVHLYA | 1022 | 0.646 | 0.313 | 0.09 |
| QAQNQPVQN | | | | | QAQTGLVQK | | | | |
| PLNGAVHLYA | 524 | 0.605 | 0.885 | 21.08 | PLNGAVNLYA | 1023 | 0.652 | 0.313 | 0.14 |
| QAQLGTVQN | | | | | QAQVMSVQN | | | | |
| PLNGAVHLYA | 525 | 0.637 | 0.882 | 7.57 | PLNGAVNLYA | 1024 | 0.682 | 0.312 | 0.09 |
| QAQRAGVQN | | | | | QAQSMSVQN | | | | |
| PVNGAVHLYA | 526 | 0.837 | 0.882 | 42.25 | PLNGAVHLYA | 1025 | 0.513 | 0.312 | 0.09 |
| QAQTGLVQN | | | | | PAQTGWGQN | | | | |
| PLNGGVHLYA | 527 | 0.529 | 0.881 | 0.33 | QLNGAVHLYA | 1026 | 0.595 | 0.311 | 0.47 |
| QAQTGWVQH | | | | | QAQTGWAQN | | | | |
| PLNGAVHLYA | 528 | 0.677 | 0.879 | 116.4 | PLNGAVHLYA | 1027 | 0.451 | 0.311 | 23.13 |
| QAQTGRVQN | | | | | QAQTVWVQN | | | | |
| PLNGAVHLYA | 529 | 0.266 | 0.876 | 0.56 | QLNGAVHLYA | 1028 | 0.742 | 0.311 | 0.09 |
| QAQTGGVKN | | | | | QAQSVSVQN | | | | |
| PLNGAVHLYA | 530 | 0.251 | 0.874 | 0.14 | PLNGAVHLYA | 1029 | 0.426 | 0.311 | 0.09 |
| QAQTAWLQN | | | | | QAQTAQLQN | | | | |
| PLNGAVHLYA | 531 | 0.269 | 0.870 | 0.14 | PLNGAVHLYA | 1030 | 0.453 | 0.311 | 0.09 |
| QAQTRWVQK | | | | | QAHVASVQN | | | | |
| PLNGAVHLYA | 532 | 0.699 | 0.858 | 0.09 | PLNGAVHLYA | 1031 | 0.440 | 0.310 | 0.09 |
| QAQLAPVKN | | | | | KAQRSTVQN | | | | |
| PLNGAVHHYA | 533 | 0.390 | 0.855 | 0.09 | QLNGAVHLYA | 1032 | 0.509 | 0.310 | 1.92 |
| QAQTSSVQN | | | | | QAQTGWVKN | | | | |
| PLNGAVHLYA | 534 | 0.402 | 0.851 | 0.14 | PLNGAVHLYA | 1033 | 0.281 | 0.310 | 0.28 |
| QAQTGSVQD | | | | | QAQTRWVKN | | | | |
| PLNGAVHLYA | 535 | 0.557 | 0.849 | 27.67 | PLNGAVHLYA | 1034 | 0.381 | 0.310 | 0.19 |
| QAQTGMVQN | | | | | QAQTAWIQN | | | | |
| PLNGAVHLYA | 536 | 0.647 | 0.848 | 15.14 | PLNGAVHLYA | 1035 | 0.393 | 0.310 | 0.09 |
| QAQLSNVQN | | | | | QAQLSQVKN | | | | |
| PLNGAVHLYA | 537 | 0.502 | 0.844 | 14.39 | SLNGAVHLYA | 1036 | 0.816 | 0.310 | 2284 |
| QAQRLPVQN | | | | | QAQTGWVQN | | | | |
| PLNGAVHLYA | 538 | 0.782 | 0.842 | 7.52 | PLNGAVHLYA | 1037 | 0.390 | 0.309 | 0.14 |
| QAQRQGVQN | | | | | QAQTSTVKN | | | | |
| PLNGAVHLYA | 539 | 0.563 | 0.839 | 0.09 | PLNGAVHLYA | 1038 | 0.654 | 0.309 | 16.82 |
| QAQSTPVQT | | | | | QAQALPVQN | | | | |
| QLNGNVHLYA | 540 | 0.844 | 0.838 | 5.56 | PLNGAVHLYD | 1039 | 0.158 | 0.309 | 0.33 |
| QAQTGWVQN | | | | | QAQTGWFQN | | | | |
| PLNGGVHLYA | 541 | 0.559 | 0.835 | 0.84 | PLNGAVHVYA | 1040 | 0.527 | 0.309 | 0.09 |
| QAQTGWVQT | | | | | QAQTGWFQN | | | | |
| PLNGAVHLYA | 542 | 0.470 | 0.833 | 0.09 | PINGAVHLYA | 1041 | 0.386 | 0.308 | 0.09 |
| QAQTTPVKN | | | | | QAQVGSVQN | | | | |
| PLNGAVHLYA | 543 | 0.700 | 0.832 | 18.65 | PLNGSVHLYA | 1042 | 0.418 | 0.308 | 0.14 |
| QAQRLTVQN | | | | | QAQTTGVQN | | | | |
| PLNGAVHLYA | 544 | 0.373 | 0.830 | 7.52 | PLNGAVHLYA | 1043 | 0.874 | 0.307 | 0.09 |
| QAQTLRVQN | | | | | KAQASPVQN | | | | |
| PLNGAVHLYA | 545 | 0.742 | 0.830 | 7.34 | PLNGSVHLYA | 1044 | 0.192 | 0.307 | 0.09 |
| QAQSAFVQN | | | | | QAQKAWVQN | | | | |
| SLNGAVHLYA | 546 | 0.586 | 0.824 | 0.09 | SLNGAVHLYA | 1045 | 0.270 | 0.307 | 0.09 |
| QAQTNSVQN | | | | | QAQVLGVQN | | | | |
| PLNGAVHLYA | 547 | 0.658 | 0.824 | 6.92 | PLNGAVHLYA | 1046 | 0.827 | 0.306 | 0.09 |
| QAQSVQVQN | | | | | QEQLMPVQN | | | | |
| PLDGAVHLYA | 548 | 0.568 | 0.823 | 0.09 | ALNGAVHLYA | 1047 | 0.872 | 0.306 | 18.51 |
| QAQTAAVQN | | | | | QSQTGWVQN | | | | |
| SLNGAVHLYA | 549 | 0.532 | 0.821 | 0.09 | PLNGYVHLYD | 1048 | 0.508 | 0.305 | 0.09 |
| QAQLMPVQN | | | | | QAQTGWVQN | | | | |
| PLDGAVHLYA | 550 | 0.621 | 0.820 | 0.47 | PLNGAVHLYA | 1049 | 0.505 | 0.305 | 0.09 |
| QAQTGWVQT | | | | | QAQTSMVQT | | | | |
| PLNGAVHLYA | 551 | 0.672 | 0.819 | 49.77 | QLNGAVHLYA | 1050 | 0.588 | 0.304 | 0.14 |
| QAQLLPVQN | | | | | QAQISSVQN | | | | |
| PLNGAVHLYA | 552 | 0.738 | 0.815 | 6.64 | PVNGAVHLYA | 1051 | 0.723 | 0.304 | 1.12 |
| QAQRTQVQN | | | | | QAQTGWVQT | | | | |
| PLNGAVHLYA | 553 | 0.254 | 0.813 | 0.79 | PLNGAVHLYA | 1052 | 0.713 | 0.303 | 0.09 |
| QAQTGSDQN | | | | | QEQTATVQN | | | | |
| PLNGAVHLYA | 554 | 0.430 | 0.808 | 0.09 | PLNGAVYLYA | 1053 | 0.352 | 0.302 | 0.09 |
| QAQVASDQN | | | | | QAQTVSVQN | | | | |
| PLNGAVNLYA | 555 | 0.744 | 0.805 | 0.09 | PLNGNVHLYA | 1054 | 0.521 | 0.302 | 0.09 |
| QAQLAPVQN | | | | | QAQTASVQN | | | | |
| PLNGSVHLYA | 556 | 0.160 | 0.804 | 0.37 | PLNGYVHLYA | 1055 | 0.556 | 0.301 | 0.09 |
| QAQTGWLQN | | | | | QAQTGLVQN | | | | |
| PLNGTVHLYA | 557 | 0.253 | 0.801 | 500.6 | PLNGAVHLYD | 1056 | 0.402 | 0.301 | 0.14 |
| QAQTGWVQN | | | | | QAQTLSVQN | | | | |
| PLNGAVHLYA | 558 | 0.857 | 0.801 | 0.14 | PLNGAVHLYA | 1057 | 0.499 | 0.300 | 0.14 |
| QAQVSPVKN | | | | | QAQTSSVQH | | | | |
| PLNGAVHLYA | 559 | 0.480 | 0.801 | 1.22 | SLNGAVHLYA | 1058 | 0.737 | 0.300 | 0.19 |
| QAQLPPVQN | | | | | QAQTGWVPN | | | | |
| PLNGAVHLYA | 560 | 0.521 | 0.794 | 0.14 | PLNGAVHLYA | 1059 | 0.839 | 0.300 | 0.09 |
| QAQSSPVQT | | | | | QAQTAMVKN | | | | |
| PLNGAVHLYA | 561 | 0.585 | 0.790 | 8.88 | TLNGAVHLYA | 1060 | 0.700 | 0.299 | 0.14 |
| QAQAQPVQN | | | | | QAQRLSVQN | | | | |
| PLNGDVHLYA | 562 | 0.434 | 0.789 | 0.09 | ALNGAVHLYA | 1061 | 0.341 | 0.297 | 1.64 |
| QAQTTSVQN | | | | | QAQTGWVQK | | | | |
| PLNGAVHLYA | 563 | 0.392 | 0.788 | 0.75 | PLNGAVHLYA | 1062 | 0.722 | 0.297 | 0.19 |
| QAQTPQVQN | | | | | KAQTALVQN | | | | |
| PLNGAVHLYA | 564 | 0.571 | 0.787 | 29.35 | QLNGAVHLYA | 1063 | 0.743 | 0.297 | 0.23 |
| QAQTSWVQN | | | | | QAQTAKVQN | | | | |
| PLNGAVHLYA | 565 | 0.254 | 0.784 | 0.51 | PLNGADHLYA | 1064 | 0.744 | 0.297 | 0.14 |
| QAQTGGDQN | | | | | QAQTTSVQN | | | | |
| PLNGAVHLYA | 566 | 0.547 | 0.782 | 0.14 | PLNGAVHLYA | 1065 | 0.259 | 0.297 | 0.93 |
| QAQLSPVKN | | | | | QAQTPWVQN | | | | |
| PLNGAVHLYA | 567 | 0.603 | 0.782 | 0.09 | PLNGTVHLYA | 1066 | 0.324 | 0.296 | 0.28 |
| QAQSSPVKN | | | | | QAQTGWIQN | | | | |
| PLNGAVHLYA | 568 | 0.727 | 0.781 | 8.41 | PLNGAVHLYA | 1067 | 0.286 | 0.296 | 0.23 |
| QAQNTTVQN | | | | | QAHTGWVQH | | | | |
| PLDGAVHLYA | 569 | 0.716 | 0.780 | 0.19 | PLNGAVHLYA | 1068 | 0.622 | 0.296 | 0.09 |
| QAQTGWVQH | | | | | RAQTASVQN | | | | |
| PLNGAVHLYA | 570 | 0.823 | 0.773 | 6.31 | TLNGAVHLYA | 1069 | 0.876 | 0.295 | 0.14 |
| QAQTTRVQN | | | | | QAQRSLVQN | | | | |
| PLDGAVHLYA | 571 | 0.722 | 0.767 | 0.09 | PLNGAVHLYA | 1070 | 0.481 | 0.294 | 0.14 |
| QAQTGWLQN | | | | | QAHTGWVQK | | | | |
| PLNGSVHLYA | 572 | 0.681 | 0.757 | 8.32 | PLNGDVHLYA | 1071 | 0.859 | 0.294 | 0.14 |
| QPQTGWVQN | | | | | QAQTAQVQN | | | | |
| PLNGAVHLYS | 573 | 0.794 | 0.755 | 25.1 | TLNGAVHLYA | 1072 | 0.407 | 0.294 | 0.14 |
| QAQTGLVQN | | | | | QAQTQPVQN | | | | |
| PLNGAVHLYA | 574 | 0.654 | 0.755 | 14.16 | PLNGAVHLYA | 1073 | 0.505 | 0.294 | 0.7 |
| QAQTQWVQN | | | | | QAQTPRVQN | | | | |
| PLNGSVHLYA | 575 | 0.187 | 0.754 | 0.33 | PRNGAVHLYA | 1074 | 0.200 | 0.293 | 0.09 |
| QAQTGWVQI | | | | | QAQTMSVQN | | | | |
| PLNGAVHLYA | 576 | 0.259 | 0.753 | 0.28 | PLNGAVHLYA | 1075 | 0.118 | 0.293 | 0.23 |
| QAQTGSVHN | | | | | QAHTVSVQN | | | | |
| ALNGAVHLYA | 577 | 0.367 | 0.751 | 1129 | PVNGAVHLYA | 1076 | 0.823 | 0.293 | 0.14 |
| QAQTGWVQN | | | | | QAQTGLVQT | | | | |
| PLNGTVHLYA | 578 | 0.224 | 0.749 | 0.14 | PLNGAVHLYA | 1077 | 0.899 | 0.292 | 87.25 |
| QAQTGWVRN | | | | | QAQSSSVQN | | | | |
| PLNGAVHLYA | 579 | 0.240 | 0.749 | 0.23 | PLNGAVHLYA | 1078 | 0.497 | 0.292 | 0.84 |
| QAQTGGLQN | | | | | QAQRPPVQN | | | | |
| SLNGAVHLYA | 580 | 0.712 | 0.748 | 0.09 | PLNGAVHLYT | 1079 | 0.779 | 0.291 | 0.09 |
| QAQVSGVQN | | | | | QAQVSPVQN | | | | |
| PLNGAVHLYA | 581 | 0.404 | 0.747 | 0.37 | PLNGAVPLYA | 1080 | 0.661 | 0.291 | 0.09 |
| QAQTAWVQK | | | | | QAQTTPVQN | | | | |
| PLNGAVHLYA | 582 | 0.660 | 0.747 | 0.19 | ALNGAVHLYA | 1081 | 0.293 | 0.290 | 1.59 |
| QAQTGRVQT | | | | | QAQTGWVKN | | | | |
| TLNGAVHLYA | 583 | 0.754 | 0.739 | 0.09 | SLNGAVHLYA | 1082 | 0.871 | 0.290 | 0.56 |
| QAQSAPVQN | | | | | QAQTGWVRN | | | | |
| PLNGAVHLYD | 584 | 0.449 | 0.738 | 0.09 | PLNGAVHLYA | 1083 | 0.316 | 0.288 | 0.09 |
| QAQTVAVQN | | | | | QAQLAGVKN | | | | |
| QLNGAVHLYA | 585 | 0.892 | 0.735 | 48.7 | PLNGAVHLYA | 1084 | 0.427 | 0.288 | 0.09 |
| QAQTGSVQN | | | | | QAQTSPAQN | | | | |
| PLNGAVHLYA | 586 | 0.858 | 0.733 | 5.37 | PLNGAVHLYA | 1085 | 0.539 | 0.288 | 0.19 |
| QAQNTQVQN | | | | | KAQLSSVQN | | | | |
| PLNGAVHLYA | 587 | 0.512 | 0.729 | 5.05 | PLNGAVHLYA | 1086 | 0.526 | 0.285 | 0.14 |
| QAQTGWLQN | | | | | QAQRSPVQT | | | | |
| PINGAVHLYA | 588 | 0.684 | 0.721 | 45.57 | PLNGAVHLYA | 1087 | 0.826 | 0.285 | 0.14 |
| QAQTGLVQN | | | | | HAQTMSVQN | | | | |
| PLDGAVHLYA | 589 | 0.600 | 0.719 | 0.09 | PLNGNVHLYA | 1088 | 0.429 | 0.284 | 0.14 |
| QAQTGWVQI | | | | | QAQTGWVKN | | | | |
| PLNGSVHLYA | 590 | 0.369 | 0.713 | 0.09 | PLNGAVHLYA | 1089 | 0.409 | 0.284 | 0.09 |
| QAQTGSVQT | | | | | QAQTGWVPH | | | | |
| PLNGAVQLYA | 591 | 0.460 | 0.711 | 0.09 | PLNGAVHLYA | 1090 | 0.442 | 0.284 | 0.09 |
| QAQTSSVQN | | | | | QAQPGWGQN | | | | |
| PLNGAVHLYA | 592 | 0.658 | 0.707 | 5.61 | PLNGVVHLYA | 1091 | 0.291 | 0.284 | 0.14 |
| QAQTYAVQN | | | | | QAQTVSVQN | | | | |
| PLNGAVHLYA | 593 | 0.575 | 0.703 | 81.37 | PLNGDVHLYA | 1092 | 0.499 | 0.283 | 0.19 |
| QAQTLSVQN | | | | | QAQTSSVQN | | | | |
| PLNGAVHLYA | 594 | 0.874 | 0.703 | 12.15 | PLNGAVHIYA | 1093 | 0.570 | 0.283 | 0.14 |
| QAQNLPVQN | | | | | QAQTLSVQN | | | | |
| PLNGAVHLYA | 595 | 0.328 | 0.702 | 0.09 | PLNGAVHLYA | 1094 | 0.597 | 0.283 | 0.19 |
| QAQTSSDQN | | | | | QAQIPPVQN | | | | |
| PLNGAVHLYA | 596 | 0.736 | 0.702 | 23.93 | SLNGAVHLYA | 1095 | 0.856 | 0.282 | 1.03 |
| QAQATSVQN | | | | | QAQTGWVQH | | | | |
| TLNGAVHLYA | 597 | 0.353 | 0.701 | 0.23 | PLNAAVHLYA | 1096 | 0.466 | 0.282 | 0.14 |
| QAQLSPVQN | | | | | QAQTGWDQN | | | | |
| PLNGAVHLYA | 598 | 0.271 | 0.700 | 0.14 | PLNGAVHRYA | 1097 | 0.823 | 0.282 | 0.09 |
| QAQTAWFQN | | | | | QAQTTSVQN | | | | |
| TLNGAVHLYA | 599 | 0.801 | 0.700 | 0.09 | PLNGSVHLYA | 1098 | 0.394 | 0.281 | 0.09 |
| QAQVTPVQN | | | | | QAQPGSVQN | | | | |
| TLNGAVHLYA | 600 | 0.202 | 0.696 | 0.09 | PLDGAVHLYA | 1099 | 0.838 | 0.281 | 0.09 |
| QAQTAAVQN | | | | | QAQTGWVEN | | | | |
| PLNGAVHLYA | 601 | 0.801 | 0.693 | 7.76 | PLNGAVHLYA | 1100 | 0.524 | 0.281 | 0.33 |
| QAQATQVQN | | | | | QAQTGRVKN | | | | |
| RLDGAVHLYA | 602 | 0.861 | 0.693 | 8.37 | PLNGAVHLYA | 1101 | 0.435 | 0.281 | 0.33 |
| QAQTGWVQN | | | | | QAQTGRLQN | | | | |
| QLNGAVHLYA | 603 | 0.840 | 0.691 | 0.09 | PLNGSVHLYA | 1102 | 0.584 | 0.281 | 0.28 |
| QAQTGWVEN | | | | | QAQTARVQN | | | | |
| PLNGAVHLYA | 604 | 0.278 | 0.691 | 0.19 | PLNGAVHLYD | 1103 | 0.378 | 0.280 | 0.19 |
| QAQVSSVKN | | | | | QAQLSSVQN | | | | |
| PLNGAVHLYA | 605 | 0.582 | 0.690 | 94.87 | ALNGAVHLYA | 1104 | 0.550 | 0.280 | 0.09 |
| QAQLSSVQN | | | | | QAQTRLVQN | | | | |
| PLNGAVHLYA | 606 | 0.209 | 0.689 | 0.33 | PLNGAVNLYA | 1105 | 0.780 | 0.280 | 0.19 |
| QAQTGSGQN | | | | | QAQTAQVQN | | | | |
| PLNGAVHLYA | 607 | 0.441 | 0.686 | 0.09 | PLNGAVHLYA | 1106 | 0.461 | 0.279 | 0.09 |
| QAQLQPVQT | | | | | QAQLSSVQH | | | | |
| PINGAVHLYA | 608 | 0.805 | 0.686 | 0.09 | PLNGAVHLYA | 1107 | 0.799 | 0.279 | 0.09 |
| QAQLSSVQN | | | | | QAHTGPVQN | | | | |
| PINGAVHLYA | 609 | 0.313 | 0.684 | 0.09 | PLKGAVHLYA | 1108 | 0.872 | 0.279 | 0.09 |
| QAQTVAVQN | | | | | QAQTLSVQN | | | | |
| PLNGAVHLYA | 610 | 0.546 | 0.680 | 0.09 | ALNGAVHLYA | 1109 | 0.499 | 0.279 | 0.09 |
| QAQVSAVKN | | | | | QAQKAWVQN | | | | |
| SLNGAVHLYA | 611 | 0.461 | 0.680 | 0.23 | PLNGAVHLYA | 1110 | 0.386 | 0.278 | 0.09 |
| QAQTVAVQN | | | | | QAQAGWVQT | | | | |
| PLNGAVHLYA | 612 | 0.882 | 0.680 | 22.29 | PLNGAVHLYA | 1111 | 0.709 | 0.278 | 0.19 |
| QAQTQAVQN | | | | | QAQTGLVQS | | | | |
| QLNGAVHLYA | 613 | 0.398 | 0.679 | 0.28 | PLNGAVHLYA | 1112 | 0.436 | 0.277 | 0.14 |
| QAQTAQVQN | | | | | QAQTGCVQI | | | | |
| PLNGAVHLYD | 614 | 0.309 | 0.676 | 0.14 | QLNGAVHLYA | 1113 | 0.529 | 0.276 | 1.26 |
| QAQTMSVQN | | | | | QAQPGWVQN | | | | |
| PLNGAVHLYA | 615 | 0.341 | 0.675 | 0.19 | PLNGAVHLYA | 1114 | 0.678 | 0.276 | 0.37 |
| QPQTGWVQK | | | | | QAQRPGVQN | | | | |
| PLNGAVHLYA | 616 | 0.855 | 0.672 | 30.47 | PLNGAVHLYA | 1115 | 0.265 | 0.276 | 0.09 |
| QAQVMPVQN | | | | | QAQTAAVQH | | | | |
| PLNGAVHLYA | 617 | 0.208 | 0.669 | 0.19 | PLNGADHLYA | 1116 | 0.728 | 0.276 | 0.09 |
| QAQTVSVQK | | | | | QAQTMPVQN | | | | |
| PLNGAVHLYA | 618 | 0.410 | 0.664 | 0.09 | PLNGAVHLYA | 1117 | 0.198 | 0.276 | 0.33 |
| QAQTAWAQN | | | | | KAQTGWVQT | | | | |
| PLNGAVHLYA | 619 | 0.764 | 0.664 | 12.06 | QLNGAVHLYA | 1118 | 0.819 | 0.275 | 0.09 |
| QAQNALVQN | | | | | QAQKAWVQN | | | | |
| TLNGAVHLYA | 620 | 0.217 | 0.663 | 0.09 | PLNGAVHLYA | 1119 | 0.116 | 0.274 | 0.98 |
| QAQVSAVQN | | | | | QAQTGCDQN | | | | |
| PLKGAVHLYA | 621 | 0.611 | 0.663 | 0.09 | PLNGTVHLYA | 1120 | 0.513 | 0.274 | 0.09 |
| QAQTTPVQN | | | | | QEQTGSVQN | | | | |
| QLNGSVHLYA | 622 | 0.776 | 0.657 | 96.83 | PLNGAVNLYA | 1121 | 0.671 | 0.274 | 0.09 |
| QAQTGWVQN | | | | | QAQSSLVQN | | | | |
| SLNGAVHLYA | 623 | 0.307 | 0.650 | 0.09 | ALNGAVHLYA | 1122 | 0.296 | 0.274 | 0.23 |
| QAQVATVQN | | | | | QAQTGWVEN | | | | |
| PLNGAVHLYA | 624 | 0.876 | 0.650 | 9.39 | PLNGTVHLYA | 1123 | 0.405 | 0.274 | 0.14 |
| QAQRMLVQN | | | | | QAQTGWVQY | | | | |
| PLNGAVHLYA | 625 | 0.589 | 0.649 | 0.09 | PINGAVHLYA | 1124 | 0.373 | 0.273 | 0.75 |
| QAQTVAVKN | | | | | QAQTGWVQK | | | | |
| PLNGAVHLYD | 626 | 0.523 | 0.649 | 0.14 | PLNGAVHLYA | 1125 | 0.820 | 0.273 | 0.09 |
| QAQTTSVQN | | | | | QAQTGRVRN | | | | |
| PLNGAVHLYA | 627 | 0.725 | 0.647 | 11.92 | PLNGAVHLYA | 1126 | 0.590 | 0.272 | 0.37 |
| QAQRQLVQN | | | | | QAQTGRDQN | | | | |
| PLNGAVHLYA | 628 | 0.754 | 0.645 | 28.79 | QLNGAVHLYA | 1127 | 0.409 | 0.272 | 0.23 |
| QAQTLGVQN | | | | | QAQSALVQN | | | | |
| PLNGAVHLYA | 629 | 0.889 | 0.645 | 0.09 | PLNGVVHLYA | 1128 | 0.422 | 0.272 | 0.09 |
| QAQLGPVQT | | | | | QAQTGWVQK | | | | |
| PLNGGVHLYA | 630 | 0.554 | 0.644 | 0.14 | PLNGAVHLYA | 1129 | 0.534 | 0.272 | 0.14 |
| QAQTGWVQD | | | | | QAHTGWGQN | | | | |
| PLNGAVHLYA | 631 | 0.205 | 0.640 | 0.98 | PLNGDVHLYA | 1130 | 0.638 | 0.272 | 0.09 |
| QAQTGSVKN | | | | | QAQRSLVQN | | | | |
| PLNGAVNLYA | 632 | 0.332 | 0.635 | 0.09 | PLNGNVHLYA | 1131 | 0.711 | 0.272 | 0.09 |
| QAQLASVQN | | | | | QAQTVWVQN | | | | |
| PLNGAVHLYD | 633 | 0.307 | 0.634 | 0.14 | PLNGAVHLYA | 1132 | 0.332 | 0.272 | 0.23 |
| QAQVSSVQN | | | | | QAPTGWVQH | | | | |
| PLNGAVHLYA | 634 | 0.355 | 0.632 | 0.14 | PLNGAVHLYS | 1133 | 0.725 | 0.271 | 0.23 |
| QAQTMSDQN | | | | | QAQTGWGQN | | | | |
| PLNGAVHLYA | 635 | 0.337 | 0.630 | 17.48 | ALNGSVHLYA | 1134 | 0.729 | 0.271 | 0.09 |
| QAQTGWVQK | | | | | QAQTGWVQT | | | | |
| PLNGAVHLYA | 636 | 0.203 | 0.630 | 0.09 | PLNGAVQLYA | 1135 | 0.347 | 0.271 | 0.09 |
| QAQLASVKN | | | | | QAQRSTVQN | | | | |
| PLNGGVHLYA | 637 | 0.490 | 0.628 | 0.23 | PLNGTVHLYA | 1136 | 0.434 | 0.271 | 0.28 |
| QAQTGWGQN | | | | | QAQTGTVQN | | | | |
| QLNGSVHLYA | 638 | 0.844 | 0.627 | 0.09 | PLNGTVHLYA | 1137 | 0.549 | 0.271 | 0.37 |
| QAQTGWVQT | | | | | QAQTGWVQI | | | | |

TABLE 42
NGS fold-enrichment of TTD-001 matured AAV capsid variants brain and DRG of
cynomolgus macaques and the brain of marmosets

| | | Brain of cynomolgus | | DRG of cynomolgus | | | |
|---|---|---|---|---|---|---|---|
| | | macaques | | macaques | | Brain of marmosets | |
| | | | Fold | Fold | Fold | Fold | Fold |
| | SEQ | Fold change | change | change | change | change | change |
| | ID | relative to | relative to | relative to | relative to | relative to | relative to |
| Sequence | NO | AAV9 | TTD-001 | AAV9 | TTD-001 | AAV9 | TTD-001 |
| ALNGAVHLYAQ | 1122 | 12.707 | 0.274 | 0.000 | 0.000 | 420.579 | 571.155 |
| AQTGWVEN | | | | | | | |
| PINGAVHLYAQ | 40 | 8.716 | 0.188 | 2.100 | 13.718 | 573.779 | 779.203 |
| AQTGWVEN | | | | | | | |
| PLNGAVHLNAQ | 41 | 0.919 | 0.020 | 2.175 | 14.212 | 677.878 | 920.572 |
| AQTGWVEN | | | | | | | |
| PLNGAVHLYAQ | 42 | 5.505 | 0.119 | 0.000 | 0.000 | 263.098 | 357.292 |
| AQSGWVEN | | | | | | | |
| PLNGAVHLYAQ | 43 | 8.721 | 0.188 | 0.827 | 5.405 | 236.026 | 320.528 |
| AQTAWVEN | | | | | | | |
| PLNGAVHLYAQ | 44 | 4.126 | 0.089 | 0.245 | 1.603 | 475.164 | 645.282 |
| AQTGCVEN | | | | | | | |
| PLNGAVHLYAQ | 871 | 18.851 | 0.406 | 0.491 | 3.206 | 288.900 | 392.332 |
| AQTGGVEN | | | | | | | |
| PLNGAVHLYAQ | 45 | 5.050 | 0.109 | 0.000 | 0.000 | 541.666 | 735.593 |
| AQTGLVEN | | | | | | | |
| PLNGAVHLYAQ | 818 | 20.878 | 0.450 | 2.856 | 18.662 | 571.096 | 775.559 |
| AQTGSVEN | | | | | | | |
| PLNGAVHLYAQ | 804 | 21.437 | 0.462 | 1.362 | 8.901 | 381.679 | 518.327 |
| AQTGWVEN | | | | | | | |
| PLNGSVHLYAQ | 499 | 43.595 | 0.939 | 2.334 | 15.248 | 490.137 | 665.615 |
| AQTGWVEN | | | | | | | |
| PVNGAVHLYAQ | 46 | 6.311 | 0.136 | 0.000 | 0.000 | 506.376 | 687.669 |
| AQTGWVEN | | | | | | | |
| QLNGAVHLYAQ | 603 | 32.086 | 0.691 | 0.000 | 0.000 | 290.854 | 394.985 |
| AQTGWVEN | | | | | | | |
| SLNGAVHLYAQ | 47 | 8.707 | 0.188 | 2.111 | 13.795 | 302.059 | 410.202 |
| AQTGWVEN | | | | | | | |
| TLNGAVHLYAQ | 48 | 0.707 | 0.015 | 0.624 | 4.074 | 254.330 | 345.385 |
| AQTGWVEN | | | | | | | |
| ALNGAVHLYAQ | 819 | 20.878 | 0.450 | 0.667 | 4.356 | 232.682 | 315.986 |
| AQTGWVHN | | | | | | | |
| PHNGAVHLYAQ | 49 | 3.604 | 0.078 | 4.410 | 28.816 | 177.855 | 241.530 |
| AQTGWVHN | | | | | | | |
| PINGAVHLYAQ | 50 | 6.387 | 0.138 | 1.083 | 7.076 | 124.477 | 169.043 |
| AQTGWVHN | | | | | | | |
| PLKGAVHLYAQ | 51 | 0.986 | 0.021 | 0.516 | 3.368 | 118.166 | 160.472 |
| AQTGWVHN | | | | | | | |
| PLNGAAHLYAQ | 52 | 0.757 | 0.016 | 1.024 | 6.693 | 91.230 | 123.892 |
| AQTGWVHN | | | | | | | |
| PLNGADHLYAQ | 53 | 0.842 | 0.018 | 0.540 | 3.529 | 15.514 | 21.069 |
| AQTGWVHN | | | | | | | |
| PLNGAGHLYAQ | 54 | 1.198 | 0.026 | 1.451 | 9.479 | 106.338 | 144.409 |
| AQTGWVHN | | | | | | | |
| PLNGALHLYAQ | 55 | 2.023 | 0.044 | 0.000 | 0.000 | 148.895 | 202.202 |
| AQTGWVHN | | | | | | | |
| PLNGAVDLYAQ | 56 | 3.104 | 0.067 | 0.000 | 0.000 | 149.296 | 202.747 |
| AQTGWVHN | | | | | | | |
| PLNGAVHHYAQ | 57 | 2.959 | 0.064 | 1.184 | 7.735 | 162.209 | 220.283 |
| AQTGWVHN | | | | | | | |
| PLNGAVHIYAQ | 58 | 2.284 | 0.049 | 0.000 | 0.000 | 160.204 | 217.560 |
| AQTGWVHN | | | | | | | |
| PLNGAVHLDAQ | 59 | 0.667 | 0.014 | 0.333 | 2.175 | 298.308 | 405.108 |
| AQTGWVHN | | | | | | | |
| PLNGAVHLNAQ | 60 | 2.297 | 0.050 | 2.821 | 18.432 | 417.906 | 567.525 |
| AQTGWVHN | | | | | | | |
| PLNGAVHLSAQ | 61 | 1.946 | 0.042 | 1.987 | 12.982 | 427.101 | 580.011 |
| AQTGWVHN | | | | | | | |
| PLNGAVHLYAK | 62 | 7.514 | 0.162 | 0.000 | 0.000 | 75.629 | 102.705 |
| AQTGWVHN | | | | | | | |
| PLNGAVHLYAQ | 63 | 2.441 | 0.053 | 0.998 | 6.522 | 78.923 | 107.179 |
| AKTGWVHN | | | | | | | |
| PLNGAVHLYAQ | 64 | 1.527 | 0.033 | 0.000 | 0.000 | 132.644 | 180.133 |
| AQAGWVHN | | | | | | | |
| PLNGAVHLYAQ | 65 | 4.707 | 0.101 | 0.000 | 0.000 | 24.765 | 33.632 |
| AQRGWVHN | | | | | | | |
| PLNGAVHLYAQ | 66 | 3.622 | 0.078 | 0.000 | 0.000 | 117.858 | 160.053 |
| AQSGWVHN | | | | | | | |
| PLNGAVHLYAQ | 946 | 16.279 | 0.351 | 0.452 | 2.953 | 234.444 | 318.380 |
| AQTAWVHN | | | | | | | |
| PLNGAVHLYAQ | 67 | 4.347 | 0.094 | 0.356 | 2.328 | 255.533 | 347.018 |
| AQTGCVHN | | | | | | | |
| PLNGAVHLYAQ | 491 | 44.261 | 0.954 | 1.261 | 8.238 | 175.856 | 238.815 |
| AQTGGVHN | | | | | | | |
| PLNGAVHLYAQ | 68 | 6.977 | 0.150 | 0.000 | 0.000 | 140.966 | 191.435 |
| AQTGLVHN | | | | | | | |
| PLNGAVHLYAQ | 576 | 34.946 | 0.753 | 2.147 | 14.025 | 187.304 | 254.363 |
| AQTGSVHN | | | | | | | |
| PLNGAVHLYAQ | 755 | 23.437 | 0.505 | 0.865 | 5.655 | 192.126 | 260.911 |
| AQTGWVHN | | | | | | | |
| PLNGAVHLYAQ | 69 | 8.212 | 0.177 | 0.000 | 0.000 | 319.448 | 433.817 |
| AQVSAVHN | | | | | | | |
| PLNGAVHLYAQ | 70 | 2.986 | 0.064 | 0.000 | 0.000 | 93.114 | 126.451 |
| EQTGWVHN | | | | | | | |
| PLNGAVHLYAQ | 71 | 1.725 | 0.037 | 0.000 | 0.000 | 26.926 | 36.566 |
| GQTGWVHN | | | | | | | |
| PLNGAVHLYDQ | 72 | 1.514 | 0.033 | 0.279 | 1.822 | 142.794 | 193.917 |
| AQTGWVHN | | | | | | | |
| PLNGAVHLYGQ | 73 | 1.401 | 0.030 | 0.000 | 0.000 | 116.707 | 158.491 |
| AQTGWVHN | | | | | | | |
| PLNGAVHLYSQ | 74 | 9.806 | 0.211 | 0.000 | 0.000 | 100.716 | 136.775 |
| AQTGWVHN | | | | | | | |
| PLNGAVHRYAQ | 75 | 5.991 | 0.129 | 0.000 | 0.000 | 13.869 | 18.834 |
| AQTGWVHN | | | | | | | |
| PLNGAVHVYAQ | 76 | 2.959 | 0.064 | 0.000 | 0.000 | 159.742 | 216.933 |
| AQTGWVHN | | | | | | | |
| PLNGAVNLYAQ | 77 | 2.387 | 0.051 | 0.631 | 4.121 | 78.989 | 107.268 |
| AQTGWVHN | | | | | | | |
| PLNGAVPLYAQ | 78 | 2.946 | 0.063 | 0.774 | 5.060 | 124.967 | 169.708 |
| AQTGWVHN | | | | | | | |
| PLNGAVQLYAQ | 79 | 2.338 | 0.050 | 1.085 | 7.091 | 105.426 | 143.170 |
| AQTGWVHN | | | | | | | |
| PLNGGVHLYAQ | 979 | 15.473 | 0.333 | 0.626 | 4.090 | 185.552 | 251.984 |
| AQTGWVHN | | | | | | | |
| PLNGSVHLYAQ | 703 | 25.824 | 0.556 | 1.283 | 8.381 | 360.426 | 489.465 |
| AQTGWVHN | | | | | | | |
| PLNGTVHLYAQ | 80 | 10.315 | 0.222 | 0.000 | 0.000 | 159.224 | 216.229 |
| AQTGWVHN | | | | | | | |
| PRNGAVHLYAQ | 81 | 2.842 | 0.061 | 1.016 | 6.636 | 163.614 | 222.192 |
| AQTGWVHN | | | | | | | |
| PVNGAVHLYAQ | 82 | 8.023 | 0.173 | 0.761 | 4.971 | 402.937 | 547.197 |
| AQTGWVHN | | | | | | | |
| QLNGAVHLYAQ | 816 | 21.018 | 0.453 | 0.794 | 5.185 | 344.539 | 467.890 |
| AQTGWVHN | | | | | | | |
| SLNGAVHLYAQ | 83 | 8.378 | 0.181 | 1.286 | 8.399 | 211.470 | 287.181 |
| AQTGWVHN | | | | | | | |
| TLNGAVHLYAQ | 84 | 1.270 | 0.027 | 0.252 | 1.648 | 136.758 | 185.720 |
| AQTGWVHN | | | | | | | |
| ALNGAVHLYAQ | 1081 | 13.477 | 0.290 | 0.084 | 0.546 | 9.629 | 13.077 |
| AQTGWVKN | | | | | | | |
| ALNGAVNLYAQ | 85 | 4.203 | 0.091 | 0.000 | 0.000 | 3.919 | 5.323 |
| AQTGWVKN | | | | | | | |
| KLNGAVHLYAQ | 86 | 7.153 | 0.154 | 0.000 | 0.000 | 9.576 | 13.004 |
| AQTGWVKN | | | | | | | |
| PHNGAVHLYAQ | 87 | 1.248 | 0.027 | 0.378 | 2.467 | 5.661 | 7.688 |
| AQTGWVKN | | | | | | | |
| PINGAVHLYAQ | 88 | 7.644 | 0.165 | 0.143 | 0.933 | 7.560 | 10.267 |
| AQTGWVKN | | | | | | | |
| PLKGAVHLYAQ | 89 | 0.748 | 0.016 | 0.103 | 0.675 | 7.088 | 9.626 |
| AQTGWVKN | | | | | | | |
| PLNAAVHLYAQ | 90 | 2.473 | 0.053 | 0.000 | 0.000 | 18.662 | 25.343 |
| AQTGWVKN | | | | | | | |
| PLNGAAHLYAQ | 91 | 0.901 | 0.019 | 0.390 | 2.547 | 5.894 | 8.004 |
| AQTGWVKN | | | | | | | |
| PLNGADHLYAQ | 92 | 3.270 | 0.070 | 0.316 | 2.064 | 0.970 | 1.317 |
| AQTGWVKN | | | | | | | |
| PLNGAGHLYAQ | 93 | 0.378 | 0.008 | 0.209 | 1.367 | 11.306 | 15.354 |
| AQTGWVKN | | | | | | | |
| PLNGALHLYAQ | 859 | 19.306 | 0.416 | 0.059 | 0.387 | 19.870 | 26.984 |
| AQTGWVKN | | | | | | | |
| PLNGAVDLYAQ | 94 | 0.937 | 0.020 | 0.000 | 0.000 | 5.016 | 6.812 |
| AQTGWVKN | | | | | | | |
| PLNGAVHHYAQ | 95 | 1.572 | 0.034 | 0.122 | 0.800 | 8.227 | 11.173 |
| AQTGWVKN | | | | | | | |
| PLNGAVHIYAQ | 96 | 11.752 | 0.253 | 0.310 | 2.024 | 10.015 | 13.600 |
| AQTGWVKN | | | | | | | |
| PLNGAVHLDAQ | 97 | 0.455 | 0.010 | 0.132 | 0.864 | 14.604 | 19.832 |
| AQTGWVKN | | | | | | | |
| PLNGAVHLNAQ | 98 | 1.725 | 0.037 | 0.739 | 4.830 | 21.040 | 28.572 |
| AQTGWVKN | | | | | | | |
| PLNGAVHLSAQ | 99 | 0.653 | 0.014 | 0.523 | 3.415 | 16.268 | 22.092 |
| AQTGWVKN | | | | | | | |
| PLNGAVHLYAE | 100 | 0.752 | 0.016 | 0.000 | 0.000 | 0.825 | 1.120 |
| AQTGWVKN | | | | | | | |
| PLNGAVHLYAH | 101 | 8.658 | 0.187 | 0.345 | 2.253 | 1.734 | 2.355 |
| AQTGWVKN | | | | | | | |
| PLNGAVHLYAK | 649 | 28.559 | 0.615 | 0.278 | 1.817 | 1.532 | 2.081 |
| AQTGWVKN | | | | | | | |
| PLNGAVHLYAL | 102 | 2.311 | 0.050 | 0.000 | 0.000 | 9.892 | 13.433 |
| AQTGWVKN | | | | | | | |
| PLNGAVHLYAP | 103 | 3.766 | 0.081 | 0.000 | 0.000 | 5.697 | 7.737 |
| AQTGWVKN | | | | | | | |
| PLNGAVHLYAQ | 104 | 0.360 | 0.008 | 0.213 | 1.394 | 2.738 | 3.718 |
| AETGWVKN | | | | | | | |
| PLNGAVHLYAQ | 105 | 7.865 | 0.169 | 0.099 | 0.648 | 1.486 | 2.018 |
| AQKGWVKN | | | | | | | |
| PLNGAVHLYAQ | 566 | 36.293 | 0.782 | 0.000 | 0.000 | 134.753 | 182.997 |
| AQLSPVKN | | | | | | | |
| PLNGAVHLYAQ | 960 | 15.955 | 0.344 | 0.000 | 0.000 | 51.408 | 69.813 |
| AQLSSVKN | | | | | | | |
| PLNGAVHLYAQ | 106 | 10.171 | 0.219 | 0.000 | 0.000 | 13.928 | 18.914 |
| AQPGWVKN | | | | | | | |
| PLNGAVHLYAQ | 107 | 3.450 | 0.074 | 0.000 | 0.000 | 7.922 | 10.758 |
| AQSGWVKN | | | | | | | |
| PLNGAVHLYAQ | 108 | 11.748 | 0.253 | 0.000 | 0.000 | 8.691 | 11.802 |
| AQSSLVKN | | | | | | | |
| PLNGAVHLYAQ | 109 | 5.856 | 0.126 | 0.169 | 1.107 | 10.452 | 14.194 |
| AQSSSVKN | | | | | | | |
| PLNGAVHLYAQ | 110 | 4.473 | 0.096 | 0.000 | 0.000 | 14.173 | 19.247 |
| AQTACVKN | | | | | | | |
| PLNGAVHLYAQ | 763 | 23.248 | 0.501 | 0.000 | 0.000 | 11.433 | 15.526 |
| AQTASVKN | | | | | | | |
| PLNGAVHLYAQ | 828 | 20.599 | 0.444 | 0.333 | 2.174 | 6.667 | 9.054 |
| AQTAWVKN | | | | | | | |
| PLNGAVHLYAQ | 111 | 0.721 | 0.016 | 0.000 | 0.000 | 14.566 | 19.781 |
| AQTEWVKN | | | | | | | |
| PLNGAVHLYAQ | 112 | 8.239 | 0.178 | 0.000 | 0.000 | 10.794 | 14.659 |
| AQTGAVKN | | | | | | | |
| PLNGAVHLYAQ | 113 | 8.144 | 0.175 | 0.222 | 1.452 | 14.865 | 20.187 |
| AQTGCVKN | | | | | | | |
| PLNGAVHLYAQ | 529 | 40.644 | 0.876 | 0.167 | 1.092 | 8.407 | 11.417 |
| AQTGGVKN | | | | | | | |
| PLNGAVHLYAQ | 114 | 10.090 | 0.217 | 0.145 | 0.945 | 10.946 | 14.864 |
| AQTGLVKN | | | | | | | |
| PLNGAVHLYAQ | 1100 | 13.059 | 0.281 | 0.000 | 0.000 | 2.607 | 3.541 |
| AQTGRVKN | | | | | | | |
| PLNGAVHLYAQ | 631 | 29.707 | 0.640 | 0.516 | 3.369 | 7.169 | 9.735 |
| AQTGSVKN | | | | | | | |
| PLNGAVHLYAQ | 765 | 23.167 | 0.499 | 0.260 | 1.700 | 10.937 | 14.852 |
| AQTGWVKN | | | | | | | |
| PLNGAVHLYAQ | 720 | 25.032 | 0.539 | 1.771 | 11.569 | 10.981 | 14.913 |
| AQTLSVKN | | | | | | | |
| PLNGAVHLYAQ | 1033 | 14.369 | 0.310 | 1.308 | 8.546 | 1.210 | 1.643 |
| AQTRWVKN | | | | | | | |
| PLNGAVHLYAQ | 700 | 26.099 | 0.562 | 0.000 | 0.000 | 29.844 | 40.528 |
| AQTSSVKN | | | | | | | |
| PLNGAVHLYAQ | 1037 | 14.347 | 0.309 | 0.000 | 0.000 | 12.484 | 16.953 |
| AQTSTVKN | | | | | | | |
| PLNGAVHLYAQ | 115 | 4.212 | 0.091 | 0.000 | 0.000 | 34.651 | 47.056 |
| AQTSWVKN | | | | | | | |
| PLNGAVHLYAQ | 625 | 30.131 | 0.649 | 0.000 | 0.000 | 22.666 | 30.781 |
| AQTVAVKN | | | | | | | |
| PLNGAVHLYAQ | 325 | 69.266 | 1.492 | 0.231 | 1.508 | 22.335 | 30.332 |
| AQTVSVKN | | | | | | | |
| PLNGAVHLYAQ | 771 | 22.784 | 0.491 | 0.000 | 0.000 | 1.612 | 2.189 |
| AQTVWVKN | | | | | | | |
| PLNGAVHLYAQ | 610 | 31.581 | 0.680 | 0.354 | 2.310 | 21.595 | 29.326 |
| AQVSAVKN | | | | | | | |
| PLNGAVHLYAQ | 558 | 37.158 | 0.801 | 0.000 | 0.000 | 40.525 | 55.033 |
| AQVSPVKN | | | | | | | |
| PLNGAVHLYAQ | 116 | 7.694 | 0.166 | 0.000 | 0.000 | 1.548 | 2.102 |
| EQTGWVKN | | | | | | | |
| PLNGAVHLYAQ | 117 | 7.014 | 0.151 | 0.000 | 0.000 | 5.931 | 8.054 |
| SQTGWVKN | | | | | | | |
| PLNGAVHLYDQ | 118 | 2.761 | 0.059 | 0.146 | 0.956 | 7.745 | 10.518 |
| AQTGWVKN | | | | | | | |
| PLNGAVHLYEQ | 119 | 7.658 | 0.165 | 0.000 | 0.000 | 7.124 | 9.675 |
| AQTGWVKN | | | | | | | |
| PLNGAVHLYGQ | 120 | 0.874 | 0.019 | 0.000 | 0.000 | 5.745 | 7.802 |
| AQTGWVKN | | | | | | | |
| PLNGAVHLYSQ | 121 | 6.910 | 0.149 | 0.000 | 0.000 | 11.682 | 15.865 |
| AQTGLVKN | | | | | | | |
| PLNGAVHLYSQ | 122 | 7.536 | 0.162 | 0.245 | 1.599 | 4.415 | 5.996 |
| AQTGWVKN | | | | | | | |
| PLNGAVHLYTQ | 123 | 0.595 | 0.013 | 0.166 | 1.086 | 10.157 | 13.793 |
| AQTGWVKN | | | | | | | |
| PLNGAVHPYAQ | 124 | 0.788 | 0.017 | 0.178 | 1.162 | 3.527 | 4.790 |
| AQTGWVKN | | | | | | | |
| PLNGAVHRSLQ | 125 | 0.153 | 0.003 | 0.449 | 2.931 | 7.938 | 10.780 |
| AQTGWVKN | | | | | | | |
| PLNGAVHRYAQ | 126 | 1.878 | 0.040 | 0.000 | 0.000 | 2.446 | 3.322 |
| AQTGWVKN | | | | | | | |
| PLNGAVHVYAQ | 127 | 1.937 | 0.042 | 0.123 | 0.802 | 7.871 | 10.689 |
| AQTGWVKN | | | | | | | |
| PLNGAVLLYAQ | 128 | 4.149 | 0.089 | 0.211 | 1.379 | 3.878 | 5.266 |
| AQTGWVKN | | | | | | | |
| PLNGAVNLYAQ | 129 | 3.505 | 0.076 | 0.000 | 0.000 | 1.145 | 1.555 |
| AQTGCVKN | | | | | | | |
| PLNGAVNLYAQ | 130 | 4.586 | 0.099 | 0.262 | 1.710 | 2.124 | 2.884 |
| AQTGWVKN | | | | | | | |
| PLNGAVNLYDQ | 131 | 2.486 | 0.054 | 0.000 | 0.000 | 9.468 | 12.858 |
| AQTGWVKN | | | | | | | |
| PLNGAVPLYAQ | 132 | 1.622 | 0.035 | 0.000 | 0.000 | 7.002 | 9.509 |
| AQTGWVKN | | | | | | | |
| PLNGAVQLYAQ | 133 | 2.014 | 0.043 | 0.381 | 2.487 | 11.888 | 16.145 |
| AQTGWVKN | | | | | | | |
| PLNGAVRSTAQ | 134 | 0.505 | 0.011 | 0.662 | 4.326 | 24.950 | 33.883 |
| AQTGWVKN | | | | | | | |
| PLNGAVSLRAQ | 135 | 0.725 | 0.016 | 1.267 | 8.277 | 6.291 | 8.543 |
| AQTGWVKN | | | | | | | |
| PLNGAVSSRAQ | 136 | 0.739 | 0.016 | 1.091 | 7.130 | 19.478 | 26.452 |
| AQTGWVKN | | | | | | | |
| PLNGDVHLYAQ | 14 | 2.905 | 0.063 | 0.000 | 0.000 | 10.919 | 14.829 |
| AQTGCVKN | | | | | | | |
| PLNGDVHLYAQ | 15 | 2.559 | 0.055 | 0.235 | 1.539 | 9.737 | 13.224 |
| AQTGWVKN | | | | | | | |
| PLNGGVHLYAQ | 864 | 19.077 | 0.411 | 0.292 | 1.905 | 4.576 | 6.214 |
| AQTGWVKN | | | | | | | |
| PLNGPVHLYAQ | 16 | 2.216 | 0.048 | 0.000 | 0.000 | 5.169 | 7.019 |
| AQTGWVKN | | | | | | | |
| PLNGSVHLYAQ | 17 | 5.707 | 0.123 | 0.000 | 0.000 | 21.281 | 28.900 |
| AQTGCVKN | | | | | | | |
| PLNGSVHLYAQ | 791 | 22.050 | 0.475 | 0.184 | 1.202 | 13.110 | 17.803 |
| AQTGWVKN | | | | | | | |
| PLNGTVHLYAQ | 978 | 15.482 | 0.334 | 0.000 | 0.000 | 17.576 | 23.868 |
| AQTGWVKN | | | | | | | |
| PLNSAVHLYAQ | 1174 | 1.468 | 0.032 | 0.000 | 0.000 | 3.674 | 4.989 |
| AQTGWVKN | | | | | | | |
| PLSGAVHLYAQ | 1175 | 0.680 | 0.015 | 0.000 | 0.000 | 8.111 | 11.015 |
| AQTGWVKN | | | | | | | |
| PPNGAVHLYAQ | 1176 | 0.829 | 0.018 | 0.546 | 3.567 | 9.008 | 12.233 |
| AQTGWVKN | | | | | | | |
| PRNGAVHLYAQ | 1177 | 1.194 | 0.026 | 0.421 | 2.751 | 9.143 | 12.417 |
| AQTGWVKN | | | | | | | |
| PVNGAVHLYAQ | 1178 | 8.167 | 0.176 | 0.145 | 0.946 | 11.979 | 16.268 |
| AQTGWVKN | | | | | | | |
| QLNGAVHIYAQ | 1179 | 6.982 | 0.150 | 0.000 | 0.000 | 14.405 | 19.563 |
| AQTGWVKN | | | | | | | |
| QLNGAVHLYAQ | 1180 | 2.446 | 0.053 | 0.000 | 0.000 | 14.453 | 19.627 |
| AQTGCVKN | | | | | | | |
| QLNGAVHLYAQ | 1181 | 7.518 | 0.162 | 0.000 | 0.000 | 1.613 | 2.190 |
| AQTGLVKN | | | | | | | |
| QLNGAVHLYAQ | 966 | 15.815 | 0.341 | 1.130 | 7.380 | 3.272 | 4.443 |
| AQTGSVKN | | | | | | | |
| QLNGAVHLYAQ | 1032 | 14.378 | 0.310 | 0.137 | 0.893 | 10.495 | 14.253 |
| AQTGWVKN | | | | | | | |
| QLNGAVHLYDQ | 1182 | 2.378 | 0.051 | 0.000 | 0.000 | 1.224 | 1.663 |
| AQTGWVKN | | | | | | | |
| RLNGAVHLYAQ | 1183 | 3.131 | 0.067 | 0.000 | 0.000 | 4.894 | 6.646 |
| AQTGWVKN | | | | | | | |
| SINGAVHLYAQ | 1184 | 1.234 | 0.027 | 0.409 | 2.671 | 4.660 | 6.328 |
| AQTGWVKN | | | | | | | |
| SLNGAVHLYAQ | 1185 | 6.104 | 0.132 | 0.328 | 2.143 | 11.122 | 15.104 |
| AQTGWVKN | | | | | | | |
| SLNGAVNLYAQ | 1186 | 1.387 | 0.030 | 0.833 | 5.444 | 5.215 | 7.083 |
| AQTGWVKN | | | | | | | |
| TLNGAVHLYAQ | 1187 | 2.176 | 0.047 | 0.108 | 0.707 | 5.355 | 7.272 |
| AQTGWVKN | | | | | | | |
| TLNGAVNLYAQ | 1188 | 1.333 | 0.029 | 0.000 | 0.000 | 1.292 | 1.754 |
| AQTGWVKN | | | | | | | |
| PLNGAVHHYAQ | 1189 | 0.937 | 0.020 | 0.000 | 0.000 | 982.466 | 1334.208 |
| AQTGWVPN | | | | | | | |
| PLNGAVHLNAQ | 1190 | 3.698 | 0.080 | 3.072 | 20.072 | 5448.821 | 7399.606 |
| AQTGWVPN | | | | | | | |
| PLNGAVHLSAQ | 1191 | 3.356 | 0.072 | 3.362 | 21.966 | 5527.158 | 7505.989 |
| AQTGWVPN | | | | | | | |
| PLNGAVHLYAQ | 1192 | 8.959 | 0.193 | 0.969 | 6.329 | 3019.591 | 4100.664 |
| AQTGCVPN | | | | | | | |
| PLNGAVHLYAQ | 314 | 71.770 | 1.546 | 2.071 | 13.534 | 2408.300 | 3270.518 |
| AQTGWVPN | | | | | | | |
| PLNGAVNLYAQ | 1193 | 5.356 | 0.115 | 1.809 | 11.822 | 2103.432 | 2856.501 |
| AQTGWVPN | | | | | | | |
| PLNGTVHLYAQ | 885 | 18.270 | 0.394 | 0.000 | 0.000 | 4688.758 | 6367.425 |
| AQTGWVPN | | | | | | | |
| PVNGAVHLYAQ | 1016 | 14.568 | 0.314 | 0.000 | 0.000 | 1269.496 | 1724.000 |
| AQTGWVPN | | | | | | | |
| QLNGAVHLYAQ | 648 | 28.572 | 0.616 | 0.000 | 0.000 | 14152.524 | 19219.405 |
| AQTGWVPN | | | | | | | |
| SLNGAVHLYAQ | 1058 | 13.914 | 0.300 | 1.876 | 12.256 | 1800.081 | 2444.545 |
| AQTGWVPN | | | | | | | |
| PLNGAVHLYAQ | 476 | 46.410 | 1 | 0.153 | 1 | 0.736 | 1 |
| AQTGWVQN | | | | | | | |
| AQAQAQTGWVQ | 1194 | 1 | 0.0215 | 1 | 6.533 | 1 | 1.358 |
| N | | | | | | | |

### Example 21. Dose-Response Evaluation of TTD-001 in Non-Human Primates (NHPs)

[1424] This Example investigates the minimal dose of an AAV particle comprising a TTD-001 capsid variant (SEQ ID NO: 3623 (DNA) and 3636 (amino acid), comprising SEQ ID NO: 3648)) that is sufficient to achieve near-physiological expression of a payload, e.g., a single stranded payload, in the central nervous system of adult cynomolgus macaques (Macaca fascicularis) via intravenous systemic delivery.

[1425] AAV particles comprising the TTD-001 capsid variant comprising a single stranded viral genome encoding a hemagglutinin (HA)-tagged NHP protein under the control of a ubiquitous CBA promoter were injected intravenously into adult male NHPs (cynomolgus macaque) (n=3, 5-7 years of age) at various doses spanning a 30-fold range, which included 6.7e11 VG/kg, 2e12 VG/kg, 6.7e12 VG/kg, and 2e13 VG.kg. The in-life period was 28 days and then various CNS and peripheral tissues were collected for measuring transgene mRNA expression by RT-qPCR, viral DNA levels by ddPCR, transgene protein expression by ELISA, and biodistribution by immunohistochemistry (staining with an anti-HA antibody).

[1426] Widespread transgene expression was detected in the spinal cord and the brain the NHPs at doses of 2e12 VG/kg and above, especially in the putamen, thalamus, globus pallidus and brainstem (Tables 43-45). Viral DNA and mRNA were readily detectable in all NHPs and showed a consistent dose response (Table 43, Table 44).

[1427] More specifically, in the brain, dose-dependent distribution of the AAV particles comprising the TTD-001 capsid was observed in the cortical regions (frontal, motor, and somatosensory), caudate, putamen, thalamus, substantia nigra, globus pallidus, hippocampus, amygdala, hypothalamus, cerebellar cortex, and dentate nucleus. Additionally, for each dose administered, there was comparable distribution of the AAV particles comprising the TTD-00 capsid in each brain region, including the cortex as well as the deeper brain regions such as the caudate, putamen, thalamus, substantia nigra, globus pallidus, hippocampus, amygdala, hypothalamus, and dentate nucleus (Table 43).

[1428] With respect to the spinal cord, dose-dependent distribution of the AAV particles comprising the TTD-001 capsid was observed in the cervical, thoracic, and lumbar spinal cord regions and the relative distribution across all these regions was similar for each dosing group. As shown in Table 43, low biodistribution was measured in the DRG, but a dose-dependent distribution of the AAV particles comprising the TTD-001 capsid was observed in the cervical, thoracic, and lumbar DRG regions and the relative distribution across all DRG regions was similar for each dosing group.

[1429] With respect to the peripheral tissues, a dose-dependent distribution of the AAV particles comprising the TTD-001 capsid was observed in the liver, hear, and the vastus lateralis (muscle) (Table 43).

TABLE 43
Quantification of viral genomes (biodistribution) by ddPCR following intravenous
administration of various doses of AAV particles comprising a TTD-001 capsid

| | Quantification of viral genomes in the Brain (VG/diploid cell) | | | | | | |
|---|---|---|---|---|---|---|---|
| Dose | Frontal | Motor | Somatosensory | | | | Dentate |
| (VG/kg) | Cortex | Cortex | Cortex | Caudate | Putamen | Thalamus | Nucleus |
| 6.7e11 | 0.01 | 0.11 | 0.07 | 0.16 | 0.13 | 0.17 | 0.03 |
| 2e12 | 2.0 | 1.72 | 0.92 | 1.27 | 0.89 | 1.16 | 0.42 |
| 6.7e12 | 4.5 | 4.20 | 3.44 | 3.44 | 2.74 | 3.04 | 2.27 |
| 2e13 | 6.7 | 7.50 | 3.04 | 6.32 | 4.94 | 6.34 | 4.14 |

| Dose | Substantia | Globus | | | | Cerebellar |
|---|---|---|---|---|---|---|
| (VG/kg) | Nigra | Pallidus | Hippocampus | Amygdala | Hypothalamus | Cortex |
| 6.7e11 | 0.12 | 0.10 | 0.1 | 0.16 | 0.14 | 0.02 |
| 2e12 | 1.12 | 1.28 | 2.1 | 2.83 | 1.77 | 0.13 |
| 6.7e12 | 2.33 | 2.47 | 2.6 | 4.38 | 2.37 | 0.53 |
| 2e13 | 5.81 | 4.43 | 5.5 | 6.13 | 4.63 | 4.18 |
| | Quantification of viral genomes in the Spinal Cord and DRG (VG/diploid cell) | | | | | |
| | Cervical | Thoracic | Lumbar | | | |
| Dose | Spinal | Spinal | Spinal | Cervical | Thoracic | Lumbar |
| (VG/kg) | Cord | Cord | Cord | DRG | DRG | DRG |
| 6.7e11 | 0.06 | 0.03 | 0.05 | 0.002 | 0.003 | 0.007 |
| 2e12 | 0.74 | 0.42 | 0.64 | 0.007 | 0.006 | 0.019 |
| 6.7e12 | 1.35 | 0.94 | 1.58 | 0.015 | 0.022 | 0.033 |
| 2e13 | 5.35 | 3.48 | 6.48 | 0.060 | 0.079 | 0.070 |

| Dose | Quantification of viral genomes in the peripheral tissues (VG/diploid cell) | | | |
|---|---|---|---|---|
| (VG/kg) | Heart | Liver | Kidney | Vastus lateralis (muscle) |
| 6.7e11 | 0.11 | 1.2 | 0.04 | 0.002 |
| 2e12 | 0.10 | 12.4 | 0.71 | 0.02 |
| 6.7e12 | 0.30 | 68.5 | 1.18 | 0.06 |
| 2e13 | 0.56 | 132.3 | 0.84 | 0.15 |

[1430] Additionally, dose-dependent transgene mRNA expression by the AAV particles comprising the 17D-001 capsid was observed in the brain, spinal cord, DRG, and peripheral tissues (Table 44). The lowest dose of the AAV particles comprising the TTD-001 capsid protein resulted in higher transgene mRNA and protein expression than a 30-fold higher dose of wild-type AAV9. Comparison of the transgene mRNA with the matching endogenous transcript indicated that a dose of 2e12VG/kg was sufficient to achieve supra-physiological levels in the central nervous system (CNS), while showing low transduction in the liver and the dorsal root ganglia (DRG) (Table 44).

TABLE 44
Quantification of transgene mRNA by RT-qPCR following intravenous administration
of various doses of AAV particles comprising a TTD-001 capsid
Transgene mRNA relative to housekeeping gene

| | Dose (VG/kg) | | | |
|---|---|---|---|---|
| Tissue | 6.7e11 VG/kg | 2e12 VG/kg | 6.7e12 VG/kg | 2e13 VG/kg |
| Frontal Cortex | 0.02 | 0.29 | 3.42 | 4.51 |
| Motor Cortex | 0.2 | 1.65 | 9.42 | 26.5 |
| Putamen | 0.11 | 0.38 | 1.76 | 2.52 |
| Dentate Nucleus | 0.01 | 0.26 | 4.38 | 15.8 |
| Cervical Spinal Cord | 0.07 | 0.63 | 2.25 | 8.26 |
| Thoracic Spinal Cord | 0.06 | 0.72 | 2.00 | 5.37 |
| Lumbar Spinal Cord | 0.10 | 0.83 | 6.71 | 27.22 |
| Cervical DRG | 0.02 | 0.29 | 0.99 | 3.58 |
| Thoracic DRG | 0.01 | 0.28 | 1.08 | 4.36 |
| Lumbar DRG | 0.02 | 0.56 | 2.21 | 4.44 |
| Heart | 0.002 | 0.33 | 5.37 | 11.45 |
| Liver | 0.04 | 0.3 | 1.43 | 2.22 |

Transgene mRNA vs. endogenous transcript (fold change relative to vehicle control)

| | Dose (VG/kg) | | | | |
|---|---|---|---|---|---|
| Tissue | Vehicle | 6.7e11 VG/kg | 2e12 VG/kg | 6.7e12 VG/kg | 2e13 VG/kg |
| Frontal Cortex | 1.0 | 0.97 | 2.04 | 12.79 | 17.04 |
| Motor Cortex | 1.0 | 2.3 | 9.4 | 42.0 | 118.3 |
| Putamen | 1.0 | 1.59 | 3.00 | 11.25 | 16.57 |
| Dentate Nucleus | 1.0 | 0.7 | 1.7 | 17.0 | 59.9 |
| Cervical Spinal Cord | 1.0 | 1.18 | 2.65 | 12.57 | 43.16 |
| Thoracic Spinal Cord | 1.0 | 1.07 | 2.26 | 10.61 | 27.96 |
| Lumbar Spinal Cord | 1.0 | 1.16 | 3.06 | 31.30 | 122.75 |
| Cervical DRG | 1.0 | 1.0 | 1.63 | 3.24 | 9.09 |
| Thoracic DRG | 1.0 | 0.98 | 1.4 | 3.02 | 7.72 |
| Lumbar DRG | 1.0 | 1.05 | 2.3 | 4.78 | 11.72 |
| Heart | 1.0 | 1.34 | 1.67 | 6.55 | 13.57 |
| Liver | 1.0 | 0.9 | 1.2 | 2.8 | 3.2 |

TABLE 45
Quantification of total transgene protein expression in the peripheral
tissues by ELISA following intravenous administration of various
doses of AAV particles comprising a TTD-001 capsid

| | Cervical DRG | Heart | Liver |
|---|---|---|---|
| | (Transgene | (Transgene | (Transgene |
| | ng/mL | ng/mL | ng/mL |
| Dose | relative | relative | relative |
| (VG/kg) | to vehicle) | to vehicle) | to vehicle) |
| Vehicle | 1.0 | 1.0 | 1.0 |
| 6.7e11 | 1.1 | 1.0 | 0.87 |
| 2e12 | 1.5 | 1.04 | 1.00 |
| 6.7e12 | 1.7 | 2.23 | 0.93 |
| 2e13 | 7.4 | 3.69 | 1.24 |

[1431] By immunohistochemistry (IHC), widespread transduction by AAV particles comprising the TTD-001 capsid variant was observed in multiple brain regions of the NHPs as compared to AAV9 at all doses administered, particularly at the medium to high doses (2e12 VG/kg, 6.7e12 VG/kg, and 2e13 VG/kg). By IHC, dose dependent expression of AAV particles comprising the TTD-001 capsid variant was observed in the brain, specifically in the temporal cortex, caudate, putamen, thalamus, substantia nigra, hippocampus, and cerebellar. Morphologically, transgene expression was observed in the neuronal cell body and the neuropil from neurons in these brain regions, including the Purkinje neurons in the cerebellar cortex and the neurons deep in the cerebellar nuclei. In the brain stem, the transgene expression was observed in various structures including the gracile-nuclei, cuneate-nuclei, and the Inferior Olivary complex.

[1432] In the spinal cord of the NHPs, dose dependent transduction was also observed in the cervical, lumbar, and thoracic regions when measured by IHC, with the most intense and widespread staining occurring at the 6.7e12 VG/kg and 2e13 VG/kg doses. Substantial staining of the motor neurons in the spinal cord was also observed at the lower dose of 2e12 VG/kg. Furthermore, the cellular tropism of the TTD-001 capsid in the spinal cord appeared to be largely neuronal and neuropil at all doses in all regions (e.g., cervical, thoracic, and lumbar) investigated.

[1433] In the DRG of the NHPs, dose dependent transduction was also observed in the cervical, lumbar, and thoracic regions, with the most staining occurring at the 6.7e12 VG/kg and 2e13 VG/kg doses. The lower dose of 2e12 VG/kg showed significantly less staining and was comparable to particles comprising an AAV9 capsid that were administered at a higher dose of 2e13 VG/kg. The cellular tropism of the TTD-001 capsid in the DRG appeared to be largely neuronal at all doses in all regions investigated.

[1434] Transduction of AAV particles comprising the TTD-001 capsid variant was also measured by IHC in various peripheral tissues of the NHPs. In the liver, the transduction observed was more variable but appeared to follow a dose-dependent trend and appeared to be lower than by particles comprising an AAV9 capsid that were administered at a dose of 2e13 VG/kg. Minimal staining was observed in the quadriceps at all doses tested. In the heart, a dose-dependent trend in transduction was also observed.

[1435] Additionally, the staining of various cells in the brain and/or spinal cord following transduction with the AAV particles comprising the TTD-001 capsid at the doses investigated was quantified. As shown in FIG. 9B, a dose of 2e13 VG/kg was sufficient to transduce >40% of total cells in highly permissive brain regions (thalamus, caudate, putamen) and >20% total cells in less permissive regions (entorhinal cortex, auditory cortex, hippocampus). Even at a lower dose of 6.7e12, this was sufficient to transduce >20% of cells in the thalamus, caudate, putamen, and cerebellum (FIG. 9A). As shown in FIG. 9C, the dose of 2e13 VG/kg also resulted in transduction of >90% SMI311-positive neurons in the thalamus, dentate and spinal cord.

[1436] Together, these data demonstrate that variant AAV capsids, including TTD-001, can achieve a large improvement of their therapeutic index by retaining strong efficacy at low dose. IX. Equivalents and Scope

[1437] Those skilled in the art will recognize, or be able to ascertain using no more than routine experimentation, many equivalents to the specific embodiments in accordance with the Detailed Description provided herein. The scope of the present disclosure is not intended to be limited to the above Detailed Description, but rather is as set forth in the appended claims.

[1438] In the claims, articles such as “a,” “an,” and “the” may mean one or more than one unless indicated to the contrary or otherwise evident from the context. Claims or descriptions that include “or” between one or more members of a group are considered satisfied if one, more than one, or all of the group members are present in, employed in, or otherwise relevant to a given product or process unless indicated to the contrary or otherwise evident from the context. The disclosure includes embodiments in which exactly one member of the group is present in, employed in, or otherwise relevant to a given product or process. The disclosure includes embodiments in which more than one, or the entire group members are present in, employed in, or otherwise relevant to a given product or process.

[1439] It is also noted that the term “comprising” is intended to be open and permits but does not require the inclusion of additional elements or steps. When the term “comprising” is used herein, the term “consisting of” is thus also encompassed and disclosed.

[1440] Where ranges are given, endpoints are included. Furthermore, it is to be understood that unless otherwise indicated or otherwise evident from the context and understanding of one of ordinary skill in the art, values that are expressed as ranges can assume any specific value or subrange within the stated ranges in different embodiments of the disclosure, to the tenth of the unit of the lower limit of the range, unless the context clearly dictates otherwise.

[1441] It is to be understood that the words which have been used are words of description rather than limitation, and that changes may be made within the purview of the appended claims without departing from the true scope and spirit of the disclosure in its broader aspects.

[1442] While the present disclosure has been described at some length and with some particularity with respect to the several described embodiments, it is not intended that it should be limited to any such particulars or embodiments or any particular embodiment, but it is to be construed with references to the appended claims so as to provide the broadest possible interpretation of such claims in view of the prior art and, therefore, to effectively encompass the intended scope of the disclosure.

[1443] All publications, patent applications, patents, and other references mentioned herein are incorporated by reference in their entirety. In case of conflict, the present specification, including definitions, will control. In addition, section headings, the materials, methods, and examples are illustrative only and not intended to be limiting.

We claim:

1. An isolated, e.g., recombinant, AAV particle comprising an AAV capsid variant and a nucleic acid comprising a transgene encoding a β-glucocerebrosidase (GBA) protein comprising the amino acid sequence of SEQ ID NO: 1775, or an amino acid sequence at least 85% (e.g., at least 90%, 95%, 96%, 97%, 98%, or 99%) identical to SEQ ID NO: 1775, wherein the AAV capsid variant comprises an amino sequence comprising the following formula: [N1]-[N2], wherein:
(i) [N1] comprises X1, X2, X3, X4, and X5, wherein:
(a) position X1 is: P, Q, A, H, K, L, R, S, or T;
(b) position X2 is: L, I, V, H, or R;
(c) position X3 is: N, D, I, K, or Y;
(d) position X4 is: G, A, C, R, or S; and
(e) position X5 is: A, S, T, G, C, D, N, Q, V, or Y; and
(ii) [N2] comprises the amino acid sequence of VHLY, VHIY, VHVY, or VHHY; and/or a substitution, e.g., a conservative substitution, of any of the aforesaid amino acids in (i) and/or (ii);
wherein [N1]-[N2] is present from N-terminus to C-terminus, immediately subsequent to position 586, numbered according to any one of SEQ ID NO: 5, 8, 138, or 3636;
optionally, wherein the AAV capsid variant comprises:
(a) an amino acid sequence at least 95% identical to the amino acid sequence of positions 203-743, e.g., a VP3, of any one of SEQ ID NO: 5, 8, or 3636; or
(b) an amino acid sequence at least 95% identical to the amino acid sequence of positions 203-736, e.g., a VP3, of SEQ ID NO: 138.

2. The isolated AAV particle of claim 1, wherein [N1] comprises PLNGA (SEQ ID NO: 3679), SLNGA (SEQ ID NO: 4684), QLNGA (SEQ ID NO: 4685), ALNGA (SEQ ID NO: 4686), PLNGS (SEQ ID NO: 4687), PVNGA (SEQ ID NO: 4688), PLNGG (SEQ ID NO: 4689), PLNGT (SEQ ID NO: 4690), PLDGA (SEQ ID NO: 4691), QLNGS (SEQ ID NO: 4692), PLNGN (SEQ ID NO: 4693), SLDGA (SEQ ID NO: 4694), HLNGA (SEQ ID NO: 4695), ALNGT (SEQ ID NO: 46%), PINGA (SEQ ID NO: 4697), ALDGA (SEQ ID NO: 4698), PLNCA (SEQ ID NO: 4699), PLNGQ (SEQ ID NO: 4700), PLDSA (SEQ ID NO: 4701), RLDGA (SEQ ID NO: 4702), QLNGN (SEQ ID NO: 4703), PLNGY (SEQ ID NO: 4704), PLDSS (SEQ ID NO: 4705), PLNGC (SEQ ID NO: 4706), PLYGA (SEQ ID NO: 4707), TLNGA (SEQ ID NO: 4708), PVDGA (SEQ ID NO: 4709), PLKGA (SEQ ID NO: 4710), PLNGD (SEQ ID NO: 4711), KLDGA (SEQ ID NO: 4712), PHNGA (SEQ ID NO: 4713), PLNGV (SEQ ID NO: 4714), PLNAA (SEQ ID NO: 4715), QLNGY (SEQ ID NO: 4716), PLDGS (SEQ ID NO: 4717), LLNGA (SEQ ID NO: 4718), PLNRA (SEQ ID NO: 4719), PLIGA (SEQ ID NO: 4720), PRNGA (SEQ ID NO: 4721), or ALNGS (SEQ ID NO: 4722), or a substitution, e.g., a conservative substitution, of any of the aforesaid amino acid sequences.

3. The isolated AAV particle of claim 1 or 2, wherein [N1]-[N2] comprises:
(i) PLNGAVHLY (SEQ ID NO: 3648), ALDGAVHLY (SEQ ID NO: 4780), ALNGAVHLY (SEQ ID NO: 4781), PINGAVHLY (SEQ ID NO: 4782), PLDGAVHLY (SEQ ID NO: 4783), PLDSAVHLY (SEQ ID NO: 4784), PLDSSVHLY (SEQ ID NO: 4785), PLNGGVHLY (SEQ ID NO: 4786), PLNGNVHLY (SEQ ID NO: 4787), PLNGSVHLY (SEQ ID NO: 4788), PLNGTVHLY (SEQ ID NO: 4789), QLNGAVHLY (SEQ ID NO: 4790), SLDGAVHLY (SEQ ID NO: 4791), SLNGAVHLY (SEQ ID NO: 4792), TLNGAVHLY (SEQ ID NO: 4793), PLNGAVHIY (SEQ ID NO: 4794), PLDGAVHVY (SEQ ID NO: 4795), or PLNGAVHHY (SEQ ID NO: 4796);
(ii) an amino acid sequence comprising any portion of an amino acid sequence in (i), e.g., any 2, 3, 4, 5, 6, 7, or 8 amino acids, e.g., consecutive amino acids, thereof;
(iii) an amino acid sequence comprising at least one, two, or three but no more than four substitutions (e.g., conservative substitutions), relative to any of the amino acid sequences in (i); or
(iv) an amino acid sequence comprising at least one, two, or three but no more than four different amino acids, relative to any one of the amino acid sequences in (i)

4. The isolated AAV particle of any one of claims 1-3, wherein the AAV capsid variant further comprises [N3], wherein [N3] comprises X6, X7, X8, and X9, wherein:
(a) position X6 is: A, D, S, or T;
(b) position X7 is: Q, K, H, L, P, or R;
(c) position X8 is: A, P, E, or R; and
(d) position X9 is: Q, H, K, or P; or a substitution, e.g., a conservative substitution, of any of the aforesaid amino acids in (a)-(d).

5. The isolated AAV particle of any one of claim 4, wherein [N3] comprises AQAQ (SEQ ID NO: 4737), SQAQ (SEQ ID NO: 4738), AQPQ (SEQ ID NO: 4739), AQSQ (SEQ ID NO: 4740), AKAQ (SEQ ID NO: 4741), AHAQ (SEQ ID NO: 4742), AQAP (SEQ ID NO: 4743), DQAQ (SEQ ID NO: 4744), APAQ (SEQ ID NO: 4745), AQAK (SEQ ID NO: 4746), AQAH (SEQ ID NO: 4747), AQEQ (SEQ ID NO: 4748), ALAQ (SEQ ID NO: 4749), ARAQ (SEQ ID NO: 4750), or TQAQ (SEQ ID NO: 4751), or a substitution, e.g., a conservative substitution, of any of the aforesaid amino acid sequences.

6. The isolated AAV particle of any one of any one of claims 1-5, wherein the AAV capsid variant further comprises [N4], wherein [N4] comprises X10, X11, and X12, wherein:
(a) position X10 is: L, T, V, R, S, A, C, I, K, M, N, P, or Q;
(b) position X11 is: S, G, A, T, M, V, Q, L, H, I, K, N, P, R, or Y; and
(c) position X12 is: P, W, S, G, A, Q, L, M, K, C, E, F, H, R, T, V, or Y; or a substitution, e.g., a conservative substitution, of any of the aforesaid amino acids in (a)-(c).

7. The isolated AAV particle of claim 6, wherein [N4] comprises:
(i) LSP, TGW, TGL, TGS, TGG, TAW, TGR, TAS, LSS, TSS, SSL, SSS, TLS, TVS, VSS, TSP, VSP, TMS, VAS, TAL, US, TLP, VLP, RGW, LSG, LAS, SSP, LLP, STS, TSA, TTP, SAL, LGS, VTP, VSA, IGW, TGF, LTP, TLA, LSA, TVG, TAP, TMP, TSL, VQS, SSM, SLP, VSQ, RSS, TST, VMS, TTA, TQP, LST, LAP, TVA, RLS, TGY, TSG, TAG, VMP, TSQ, TMA, VGS, TSW, TGV, TGT, TLG, LMP, VQP, TGM, SMS, SQL, IGS, RSV, TAA, STP, LSQ, TAQ, TGP, ASP, VSG, SAP, TLQ, LQP, TAT, TGQ, ATS, IGG, VAA, TSM, TVW, TAM, TGA, VAT, QSP, TQA, VQA, RSP, LAT, VAQ, LAA, RST, RTL, LGT, LMS, LGP, RTS, SQP, VLG, SVS, TMQ, SAV, LAG, SGP, TNS, RLT, TTQ, SAA, TSV, RLG, RAS, STQ, CSP, SAG, ALP, VTS, ISP, SVG, LTS, TTT, RSG, TQL, LNP, TVQ, IAS, LAQ, LSR, LSN, TTG, TSN, SMA, TKS, SVA, TQQ, VQQ, RLP, SAM, TAV, TQW, SSR, TQT, VNS, RSA, LMG, RQS, LVG, VTA, RTT, SMG, VMA, TKP, SAQ, NSP, ATP, VAG, RGS, VKP, RMS, NLP, NAL, RTP, RQL, VQG, VTG, VST, NAS, RVE, ATG, AMS, RNS, VMQ, SMQ, LQQ, TMG, LGQ, TSH, AAP, RSQ, TYS, ITP, VAK, TQM, TKA, SQQ, ISG, VSR, RTA, RML, SQM, VAN, CTP, ISS, AGP, TAK, RTG, LHP, TMT, AQP, QAP, RQP, LKS, NTT, TSK, RYS, KSS, NTP, VGG, IAA, LMA, MAP, VHP, VLS, LAN, ATQ, TNA, TAN, VSN, AAA, AVG, LTA, SAN, RAG, RQG, TLR, LSH, SAF, RAA, IQP, ILG, VNG, SVQ, LSK, TNG, RTQ, TMN, RGG, TTR, VRP, VKA, LAR, NQP, TMK, TYA, TQK, TTK, IAG, TQN, LAH, NTQ, RQQ, RAQ, TKQ, TQH, TNQ, LMQ, VNA, VQT, TQR, VGK, VKQ, IQS, LQR, TMM, VGN, RIG, SAK, RIA, VQN, NVQ, RIP, NAQ, NMQ, TPS, LTN, VTK, PGW, LPP, SPP, TPA, TGC, VPP, TPT, TPW, TPP, RPP, TPQ, TPR, TPG, VPA, VPQ, RPG, KGW, TRW, TAR, IPP, RSL, LVP, KGS, VAP, KGG, KAW, PGS, TRL, or AGW, or a substitution, e.g., a conservative substitution, of any of the aforesaid amino acid sequences;
(ii) LSP; or
(iii) TGW.

8. The isolated AAV particle of any one of claims 1-7, wherein the AAV capsid variant further comprises [N5], wherein [N5] comprises X13, X14, and X15, wherein:
(a) position X13 is: V, D, F, G, L, A, E, or I;
(b) position X14 is: K, P Q, R, H, E, or L; and
(c) position X15 is: N, T, K, H, D, Y, S, I, or P; or a substitution, e.g., a conservative substitution, of any of the aforesaid amino acids in (a)-(c).

9. The isolated AAV particle of claim 8, wherein [N5] comprises:
(i) VQN, VPN, VKN, VQT, VQK, DQN, VQH, GQN, VQI, VHN, FQN, LQN, VLN, VRN, VQS, VQY, AQN, VEN, VQD, IQN, VKK, DKN, VKT, VQP, EQN, GQT, FQK, GHN, or VPH, or a substitution, e.g., a conservative substitution, of any of the aforesaid amino acid sequences;
(ii) VKN, VPN, VEN, or VHN; or
(iii) VQN.

10. The isolated AAV particle of claim 8 or 9, wherein [N1]-[N2]-[N3]-[N4]-[N5] comprises:
(i) the amino acid sequence of any of SEQ ID NOs: 139-1138;
(ii) the amino acid sequence of PLNGAVHLYAQAQLSPVKN (SEQ ID NO: 566);
(iii) the amino acid sequence of PLNGAVHLYAQAQTGWVPN (SEQ ID NO: 314);
(iv) the amino acid sequence of PLNGAVHLY (SEQ ID NO: 3648);
(v) the amino acid sequence of any of SEQ ID NOs: 14-17, 40-136, 314, 325, 491, 499, 529, 558, 566, 576, 603, 610, 625, 631, 648, 649, 700, 703, 720, 755, 763, 765, 771, 791, 804, 816, 818, 819, 828, 859, 864, 871, 885, 946, 960, 966, 978, 979, 1016, 1033, 1032, 1037, 1058, 1081, 1100, 1122, or 1174-1193;
(v) an amino acid sequence comprising any portion of an amino acid sequence in (i)-(v), e.g., any 2, 3, 4, 5, 6, 7, 8, 9, 10, 11, 12, 13, 14, 15, 16, 17, or 18 amino acids, e.g., consecutive amino acids, thereof;
(vi) an amino acid sequence comprising at least one, two, or three but no more than four substitutions (e.g., conservative substitutions), insertions, or deletions, relative to any of the amino acid sequences in (i)-(v); or
(vii) an amino acid sequence comprising at least one, two, or three but no more than four different amino acids, relative to any one of the amino acid sequences in (i)-(v).

11. The isolated AAV particle of any one of claims 8-10, wherein the AAV capsid variant comprises from N-terminus to C-terminus [N1]-[N2]-[N3]-[N4]-[N5], wherein:
(i) [N1] is present immediately subsequent to position 586, and replaces positions 587 and 588 (e.g., A587 and Q588), numbered according to SEQ ID NO: 138;
(ii) [N2] is present immediately subsequent to [N1];
(iii) [N3] is present immediately subsequent to position 588, and replaces positions 589-592 (e.g., A589, Q590, A591, Q592), numbered according to the amino acid sequence of SEQ ID NO: 138;
(iv) [N4] is present immediately subsequent to position 592, and replaces positions 593-595 (e.g., T593, G594, W595), numbered according to the amino acid sequence of SEQ ID NO: 138;
(v) [N5] is present immediately subsequent to position 595, and replaces positions 596-598 (e.g., V596, Q597, N598), numbered according to the amino acid sequence of SEQ ID NO: 138; and/or
(vi) [N1]-[N2]-[N3]-[N4]-[N5] is present immediately subsequent to position 586 and replaces positions 587-598 (e.g., A587, Q588, A589, Q590, A591, Q592, T593, G594, W595, V596, Q597, N598), numbered according to SEQ ID NO: 138.

12. The isolated AAV particle of any one of claims 8-11, wherein:
(i) the AAV capsid variant comprises an amino acid other than A at position 587 and/or an amino acid other than Q at position 588, numbered according to SEQ ID NO: 138;
(ii) [N1] corresponds to positions 587-591 of SEQ ID NO: 5, 8, or 3636;
(iii) [N2] corresponds to positions 592 to 595 of SEQ ID NO: 5, 8, or 3636;
(iv) [N3] corresponds to positions 596-599 of SEQ ID NO: 5, 8, or 3636;
(v) [N4] corresponds to positions 600-602 of SEQ ID NO: 5, 8, or 3636;
(vi) [N5] corresponds to positions 603-605 of SEQ ID NO: 5, 8, or 3636; and/or
(vii) [N1]-[N2]-[N3]-[N4]-[N5] corresponds to positions 587-605 of SEQ ID NO: 5, 8, or 3636.

13. An isolated, e.g., recombinant, AAV particle comprising an AAV capsid variant and a nucleic acid comprising a transgene encoding a β-glucocerebrosidase (GBA) protein comprising the amino acid sequence of SEQ ID NO: 1775, or an amino acid sequence at least 85% (e.g., at least 90%, 95%, 96%, 97%, 98%, or 99%) identical to SEQ ID NO: 1775, wherein the AAV capsid variant comprises [A][B], wherein [A] comprises the amino acid sequence of PLNGA, and [B] comprises X1, X2, X3, X4, wherein:
(i) X1 is: V, I, L, A, F, D, or G;
(ii) X2 is: H, N, Q, P, D, L, R, or Y;
(iii) X3 is: L, H, I, R, or V; and
(iv) X4 is Y; and/or
wherein the AAV capsid variant comprises an amino acid modification, e.g., a conservative substitution, of any of the aforesaid amino acids in (i)-(iv);
wherein [A][B] is present from N-terminus to C-terminus, immediately subsequent to position 586, numbered according to any one of SEQ ID NO: 5, 8, 138, or 3636;
optionally wherein the AAV capsid variant comprises:
(a) an amino acid sequence at least 95% identical to the amino acid sequence of positions 203-743, e.g., a VP3, of any one of SEQ ID NO: 5, 8, or 3636; or
(b) an amino acid sequence at least 95% identical to the amino acid sequence of positions 203-736, e.g., a VP3, of SEQ ID NO: 138.

14. The isolated AAV particle of claim 13, wherein [B] is or comprises:
(i) VHLY (SEQ ID NO: 4680), VHHY (SEQ ID NO: 4683), VHIY (SEQ ID NO: 4681), VNLY (SEQ ID NO: 4724), VQLY (SEQ ID NO: 4729), IHLY (SEQ ID NO: 4730), LHLY (SEQ ID NO: 4727), VPLY (SEQ ID NO: 4723), VDLY (SEQ ID NO: 4731), AHLY (SEQ ID NO: 4732), VHRY (SEQ ID NO: 4725), FHLY (SEQ ID NO: 4726), DHLY (SEQ ID NO: 4728), VLLY (SEQ ID NO: 4733), GHLY (SEQ ID NO: 4734), VRLY (SEQ ID NO: 4735), VHVY (SEQ ID NO: 4682), or VYLY (SEQ ID NO: 4736), or a substitution, e.g., a conservative substitution, of any of the aforesaid amino acid sequences; or
(ii) VHLY (SEQ ID NO: 4680).

15. The isolated AAV particle of claim 13 or 14, wherein [A][B] comprises:
(i)
(SEQ ID NO: 3648)
PLNGAVHLY,
(SEQ ID NO: 4796)
PLNGAVHHY,
(SEQ ID NO: 4794)
PLNGAVHIY,
(SEQ ID NO: 5123)
PLNGAVNLY,
(SEQ ID NO: 5124)
PLNGAVQLY,
(SEQ ID NO: 5125)
PLNGAIHLY,
(SEQ ID NO: 5126)
PLNGALHLY,
(SEQ ID NO: 5127)
PLNGAVPLY,
(SEQ ID NO: 5128)
PLNGAVDLY,
(SEQ ID NO: 5129)
PLNGAAHLY,
(SEQ ID NO: 5130)
PLNGAVHRY,
(SEQ ID NO: 5131)
PLNGAFHLY,
(SEQ ID NO: 5132)
PLNGADHLY,
(SEQ ID NO: 5133)
PLNGAVLLY,
(SEQ ID NO: 5134)
PLNGAGHLY,
(SEQ ID NO: 5135)
PLNGAVRLY,
(SEQ ID NO: 5136)
PLNGAVHVY,
or
(SEQ ID NO: 5137)
PLNGAVYLY;
(ii)
(SEQ ID NO: 3648)
PLNGAVHLY;
(iii) an amino acid sequence comprising any portion of an amino acid sequence in (i) or (ii), e.g., any 2, 3, 4, 5, 6, 7, or 8 amino acids, e.g., consecutive amino acids, thereof;
(iv) an amino acid sequence comprising at least one, two, or three but no more than four substitutions (e.g., conservative substitutions), insertions, or deletions, relative to any of the amino acid sequences in (i) or (ii); or
(v) an amino acid sequence comprising at least one, two, or three but no more than four different amino acids, relative to any one of the amino acid sequences in (i) or (ii).

16. The isolated AAV particle of any one of claims 13-15, wherein the AAV capsid variant further comprises [C], wherein [C] comprises X4, X5, X6, and X7, wherein:
(a) position X4 is: A, D, S, or T;
(b) position X5 is: Q, K, H, L, P, or R;
(c) position X6 is: A, P, or E; and
(d) position X7 is: Q, H, K, or P;
or a substitution, e.g., a conservative substitution, of any of the aforesaid amino acids in (a)-(d).

17. The isolated AAV particle of claim 16, wherein [C] is or comprises:
(i) AQAQ (SEQ ID NO: 4737), AQPQ (SEQ ID NO: 4739), AKAQ (SEQ ID NO: 4741), DQAQ (SEQ ID NO: 4744), SQAQ (SEQ ID NO: 4738), AHAQ (SEQ ID NO: 4742), AQEQ (SEQ ID NO: 4748), AQAK (SEQ ID NO: 4746), ALAQ (SEQ ID NO: 4749), APAQ (SEQ ID NO: 4745), ARAQ (SEQ ID NO: 4750), AQAH (SEQ ID NO: 4747), AQAP (SEQ ID NO: 4743), or TQAQ (SEQ ID NO: 4751), or a substitution, e.g., a conservative substitution, of any of the aforesaid amino acid sequences; or
(ii) AQAQ (SEQ ID NO: 4737).

18. The isolated AAV particle of any one of claims 1-17, wherein the AAV capsid variant further comprises:
(i) the amino acid L at position 593 numbered according to SEQ ID NO: 138 or at position 600 numbered according to SEQ ID NO: 5, 8, or 3636; the amino acid S at position 594 numbered according to SEQ ID NO: 138, or at position 601 numbered according to SEQ ID NO: 5, 8, or 3636; and the amino acid P at position 595 numbered according to SEQ ID NO: 138 or at position 602 numbered according to SEQ ID NO: 5, 8, or 3636; or
(ii) the amino acid T at position 593 numbered according to SEQ ID NO: 138 or at position 600 numbered according to SEQ ID NO: 5, 8, or 3636; the amino acid G at position 594 numbered according to SEQ ID NO: 138, or at position 601 numbered according to SEQ ID NO: 5, 8, or 3636; and the amino acid W at position 595 numbered according to SEQ ID NO: 138 or at position 602 numbered according to SEQ ID NO: 5, 8, or 3636.

19. The isolated AAV particle of any one of claims 13-18, wherein the AAV capsid variant further comprises [D], wherein [D] comprises X8, X9, and X10, wherein:
(a) position X8 is: L, T, V, S, R, I, A, N, C, Q, M, P, or K;
(b) position X9 is: S, G, T, M, A, G, K, Q, V, I, R, N, P, L, H, or Y; and
(c) position X10 is: P, W, K, Q, S, C, A, G, N, T, R, V, M, H, L, E, F, or Y; or a substitution, e.g., a conservative substitution, of any of the aforesaid amino acids in (a)-(c).

20. The isolated AAV particle of any one of claims 13-19, wherein [D] is or comprises:
(i) LSP, TGW, TTK, TMK, VAQ, TAW, TGS, VKQ, SAP, LSK, LAP, LAQ, TAK, SAK, TGC, TQK, TVA, UQ, TAQ, RIA, RAS, UP, LTP, STP, TSP, TMQ, TSK, VSQ, VSP, TVQ, VTA, RQP, ISG, VRP, LGP, TNQ, VQQ, VAN, AAP, RST, TMA, IQP, IAS, TVS, RGS, NSP, LQP, VTG, VMQ, SMA, VGK, IQS, CSP, LQR, TPP, VTK, SSP, AGP, LAR, TIT, TGG, TLQ, TMS, VAK, RAA, TVG, LNP, LSQ, TKP, TNA, LAT, VTP, VQA, US, CTP, TAG, TSQ, TMN, TST, VKP, ASP, VAA, LKS, IAA, TAA, TKA, VSN, TAP, LMP, LHP, RAQ, LTN, RU, TSV, RMS, VGN, LMQ, TAT, VHP, ISS, VAS, TRW, TMT, RSS, RTG, VAT, VTS, VSS, TNS, VKA, SGP, TGP, TAM, TQP, TQQ, VSR, VSA, VLS, TQH, LAS, QAP, NAQ, ATP, VQP, TTA, LAA, RSG, LMA, TMP, LAN, VST, SAQ, NTP, TGL, TAV, RLG, RTL, TQM, ITP, TVW, RSA, TAS, TMG, VQS, ISP, VGG, TAL, LAG, RTA, RSP, TLA, LAH, TSL, RLS, LMG, SMQ, TQT, VGS, VSG, VMA, IGG, IAG, TGR, LSH, VQT, RNS, TLP, TKQ, LGQ, NMQ, NVQ, RGG, VMS, TTG, LSR, MAP, ILG, TGT, TSS, TSH, RIG, SAM, TSM, SMG, SMS, TSG, TGA, VNS, VAG, IGS, LGS, VNG, LTA, VQN, TKS, SVG, NAS, TSA, TAN, LTS, RSQ, RIP, RVE, VLP, SVA, LQQ, LST, SAA, RTS, TQN, VNA, LMS, TMM, RSV, TQL, RTP, RQQ, VQG, PGW, STQ, QSP, RYS, TQR, SAG, RQS, SQP, STS, VLG, NQP, LGT, RAG, TGM, LSN, RLP, RQG, RLT, TLR, SAF, SVQ, LLP, RTQ, LPP, AQP, TPQ, TSW, NTT, UR, TQW, NTQ, TYA, TLS, NLP, ATS, ATQ, LSS, TQA, VMP, NAL, RML, RQL, TLG, TGF, SAL, SQL, LSA, TGQ, TNG, AAA, SAV, LSG, SSR, SPP, LVG, TPA, KGW, VPP, ATG, SAN, SQQ, SSM, AVG, VAP, TPS, RGW, SSL, TYS, TPT, IGW, KSS, TGY, RSL, SVS, TSN, SQM, VPA, AMS, TPG, TGV, VPQ, SLP, ALP, TPW, TPR, SSS, RPP, IPP, AGW, or RPG, or a substitution, e.g., a conservative substitution, of any of the aforesaid amino acid sequences;
(ii) LSP; or
(iii) TGW.

21. The isolated AAV particle of any one of claims 1-20, wherein the AAV capsid variant further comprises:
(i) the amino acid V at position 5% numbered according to SEQ ID NO: 138 or at position 603 numbered according to SEQ ID NO: 5, 8, or 3636; the amino acid K, P, E or H at position 597 numbered according to SEQ ID NO: 138 or at position 604 numbered according to SEQ ID NO: 5, 8, or 3636; and the amino acid N at position 598 numbered according to the amino acid sequence of SEQ ID NO: 138 or at position 605 numbered according to SEQ ID NO: 5, 8, or 3636;
(ii) the amino acid V at position 5% numbered according to SEQ ID NO: 138 or at position 603 numbered according to SEQ ID NO: 5, 8, or 3636; the amino acid K at position 597 numbered according to SEQ ID NO: 138 or at position 604 numbered according to SEQ ID NO: 5, 8, or 3636; and the amino acid N at position 598 numbered according to the amino acid sequence of SEQ ID NO: 138 or at position 605 numbered according to SEQ ID NO: 5, 8, or 3636;
(iii) the amino acid V at position 596 numbered according to SEQ ID NO: 138 or at position 603 numbered according to SEQ ID NO: 5, 8, or 3636; the amino acid P at position 597 numbered according to SEQ ID NO: 138 or at position 604 numbered according to SEQ ID NO: 5, 8, or 3636; and the amino acid N at position 598 numbered according to the amino acid sequence of SEQ ID NO: 138 or at position 605 numbered according to SEQ ID NO: 5, 8, or 3636; or
(iv) the amino acid V at position 596 numbered according to SEQ ID NO: 138 or at position 603 numbered according to SEQ ID NO: 5, 8, or 3636; the amino acid Q at position 597 numbered according to SEQ ID NO: 138 or at position 604 numbered according to SEQ ID NO: 5, 8, or 3636; and the amino acid N at position 598 numbered according to the amino acid sequence of SEQ ID NO: 138 or at position 605 numbered according to SEQ ID NO: 5, 8, or 3636.

22. The isolated AAV particle of any one of claims 13-21, wherein the AAV capsid variant further comprises [E], wherein [E] comprises X11, X12, and X13, wherein:
(a) position X11 is: V, D, F, A, E, L, G, or I;
(b) position X12 is: Q, R, P, K, L, H, or E; and
(c) position X13 is: N, H, S, T, P, K, I, D, or Y; or a substitution, e.g., a conservative substitution, of any of the aforesaid amino acids in (a)-(c).

23. The isolated AAV particle of claim 22, wherein [E] comprises:
(i) VQN, DQN, VQH, FQN, VQS, VQT, VQP, VRN, VPN, VKN, AQN, VQK, EQN, VQI, LQN, GQT, VLN, VQD, VHN, GQN, VKT, VKK, FQK, VEN, VQY, DKN, GHN, IQN, or VPH, or a substitution, e.g., a conservative substitution, of any of the aforesaid amino acid sequences; or
(ii) VKN, VPN, or VQN.

24. The isolated AAV particle of claim 22 or 23, wherein [A][B][C][D][E] comprises:
(i) the amino acid sequence of any of SEQ ID NOs: 143, 148, 149, 151, 153, 154-158, 160-163, 166, 168, 170, 171, 173-175, 177-179, 181, 182, 184-188, 191-197, 199-210, 212-215, 217-225, 227-231, 233, 234, 236-240, 243-262, 265, 267, 268, 270-277, 279, 282, 284-286, 288-293, 295, 296, 298, 300-314, 316-327, 329, 331, 332, 334, 336, 337-344, 346-350, 352-354, 356-365, 367, 369, 371-380, 382-385, 387, 392-394, 396, 397, 399-401, 404-411, 413-415, 417, 419-429, 432, 433, 435-437, 438, 440-442, 444-447, 450-454, 456, 458-461, 464, 465, 467-469, 471-484, 487-495, 497, 498, 500-503, 505, 507-512, 514-517, 522-525, 528-539, 542-545, 547, 551-555, 558-561, 563-568, 570, 573, 574, 576, 579, 581, 582, 584, 586, 587, 591-596, 598, 601, 604, 605, 606, 607, 610, 612, 614-619, 624-629, 631-636, 640, 641, 645, 646, 649, 650, 656, 658, 661, 663, 664, 666, 668, 669, 670, 672, 673, 674, 675, 677, 679, 683, 684, 686, 688, 689, 691, 693, 695, 696, 697, 699, 700, 701, 702, 704-706, 709-714, 720, 722, 725-731, 733, 736, 740, 745, 749-752, 754, 755, 757, 758, 760-765, 767, 768, 770, 771, 773, 778-780, 783-788, 792-794, 797-799, 801, 802, 804-806, 812, 814, 815, 817, 818, 820, 821, 824, 828, 831, 832, 834-837, 839, 840-845, 847, 848, 850-855, 857-859, 861, 862, 865, 866, 869-872, 874-876, 882-884, 887, 889-895, 897, 899, 901, 903-905, 907, 908, 910, 911, 913, 915, 919, 920, 923, 924, 926, 927, 929, 931-933, 935, 937, 939-949, 952-955, 957, 958, 960, 962, 964, 965, 967, 971, 973, 974, 976, 977, 981, 985-989, 992, 994, 997-1000, 1002, 1004, 1006-1008, 1010, 1013, 1015, 1017, 1018, 1020, 1021, 1023-1025, 1027, 1029-1031, 1033-1035, 1037-1040, 1043, 1046, 1049, 1052, 1053, 1056, 1057, 1059, 1062, 1064, 1065, 1067, 1068, 1070, 1073, 1075, 1077-1080, 1083-1087, 1089, 1090, 1093, 1094, 1097, 1100, 1101, 1103, 1105-1107,1110-1112, 1114-1117, 1119, 1121, 1125, 1126, 1129, 1132, 1133, 1135;
(ii) PLNGAVHLYAQAQLSPVKN (SEQ ID NO: 566);
(iii) PLNGAVHLYAQAQTGWVPN (SEQ ID NO: 314);
(iv) PLNGAVHLY (SEQ ID NO: 3648);
(v) an amino acid sequence comprising any portion of an amino acid sequence in (i)-(iv), e.g., any 2, 3, 4, 5, 6, 7, 8, 9, 10, 11, 12, 13, 14, 15, 16, 17, or 18 amino acids, e.g., consecutive amino acids, thereof;
(vi) an amino acid sequence comprising at least one, two, or three but no more than four substitutions (e.g., conservative substitutions), insertions, or deletions, relative to any of the amino acid sequences in (i)-(iv); or
(vii) an amino acid sequence comprising at least one, two, or three but no more than four different amino acids, relative to any one of the amino acid sequences in (i)-(iv).

25. The isolated AAV particle of any one of claims 22-24, which comprises from N-terminus to C-terminus [A][B][C][D][E], wherein:
(i) [A] is present immediately subsequent to position 586, and replaces positions 587 and 588 (e.g., A587 and Q588), numbered according to SEQ ID NO: 138;
(ii) [B] is present immediately subsequent to [A];
(iii) [C] is present immediately subsequent to position 588, and replaces positions 589-592 (e.g., A589, Q590, A591, Q592), numbered according to the amino acid sequence of SEQ ID NO: 138;
(iv) [D] is present immediately subsequent to position 592, and replaces positions 593-595 (e.g., T593, G594, W595), numbered according to the amino acid sequence of SEQ ID NO: 138;
(v) [E] is present immediately subsequent to position 595, and replaces positions 596-598 (e.g., V596, Q597, N598), numbered according to the amino acid sequence of SEQ ID NO: 138; and/or
(vi) [A][B][C][D][E] is present immediately subsequent to position 586 and replaces positions 587-598 (e.g., A587, Q588, A589, Q590, A591, Q592, T593, G594, W595, V5%, Q597, N598), numbered according to SEQ ID NO: 138.

26. The isolated AAV particle of any one of claims 22-25, wherein:
(i) the AAV capsid variant comprises an amino acid other than A at position 587 and/or an amino acid other than Q at position 588, numbered according to SEQ ID NO: 138;
(ii) [A] corresponds to positions 587-591 of SEQ ID NO: 5, 8, or 3636;
(iii) [B] corresponds to positions 592 to 595 of SEQ ID NO: 5, 8, or 3636;
(iv) [C] corresponds to positions 596-599 of SEQ ID NO: 5, 8, or 3636;
(v) [D] corresponds to positions 600-602 of SEQ ID NO: 5, 8, or 3636;
(vi) [E] corresponds to positions 603-605 of SEQ ID NO: 5, 8, or 3636; and/or
(vii) [A][B][C][D][E] corresponds to positions 587-605 of SEQ ID NO: 5, 8, or 3636.

27. The isolated AAV particle of any one of claims 1-26, which comprises:
(i) the amino acid sequence corresponding to positions 203-743, e.g., a VP3, of any one of SEQ ID NOs: 5, 8, or 3636, or a sequence with at least 90%, 95%, 96%, 97%, 98%, or 99% sequence identity thereto
(ii) the amino acid sequence corresponding to positions 138-743, e.g., a VP2, of any one of SEQ ID NOs: 5, 8, or 3636, or a sequence with at least 90%, 95%, 96%, 97%, 98%, or 99% sequence identity thereto;
(iii) the amino acid sequence of any one of SEQ ID NOs: 5, 8, or 3636 (e.g., a VP1), or an amino acid sequence with at least 90%, 95%, 96%, 97%, 98%, or 99% sequence identity thereto;
(iv) an amino acid sequence comprising at least one, two or three modifications, e.g., substitutions (e.g., conservative substitutions), but not more than 30, 20 or 10 modifications, e.g., substitutions (e.g., conservative substitutions), relative to the amino acid sequence of any one of SEQ ID NO: 5, 8, or 3636; and/or
(v) an amino acid sequence comprising at least one, two or three, but not more than 30, 20 or 10 different amino acids, relative to the amino acid sequence of any one of SEQ ID NO: 5, 8, or 3636.

28. An isolated, e.g., recombinant, AAV particle comprising an AAV capsid variant and a nucleic acid comprising a transgene encoding a β-glucocerebrosidase (GBA) protein comprising the amino acid sequence of SEQ ID NO: 1775, or an amino acid sequence at least 85% (e.g., at least 90%, 95%, 96%, 97%, 98%, or 99%) identical to SEQ ID NO: 1775, wherein the AAV capsid variant comprises:
(i) the amino acid sequence of PLNGAVHLY (SEQ ID NO: 3648);
(ii) an amino acid sequence comprising at least 5, 6, 7, 8, or 9 consecutive amino acids from the amino acid sequence of PLNGAVHLY (SEQ ID NO: 3648);
(iii) an amino acid sequence comprising at least one, two, or three but no more than four substitutions (e.g., conservative substitutions), relative to the amino acid sequence of PLNGAVHLY (SEQ ID NO: 3648); or
(iv) an amino acid sequence comprising at least one, two, or three but no more than four different amino acids relative to the amino acid sequence of PLNGAVHLY (SEQ ID NO: 3648)
wherein the amino acid sequence of (i)-(iv) is present immediately subsequent to position 586, numbered according to any one of SEQ ID NOs: 5, 8, 138, or 3636;
optionally wherein the AAV capsid variant further comprises:
(a) a VP1 protein comprising the amino acid sequence of SEQ ID NO: 5, 8, 3636;
(b) a VP2 protein comprising the amino acid sequence of positions 138-743 of SEQ ID NO: 5, 8, or 3636;
(c) a VP3 protein comprising the amino acid sequence of positions 203-743 of SEQ ID NO: 5, 8, or 3636; or
(d) an amino acid sequence at least 90% (e.g., at least 92%, 95%, 96%, 97%, 98%, or 99%) identical to any one the amino acid sequences of (a)-(b).

29. The isolated AAV particle of any one of claims 1-28, wherein the nucleotide sequence encoding the GBA protein comprises the nucleotide sequence of any one of SEQ ID NOs: 1773, 1777, or 1781, or a nucleotide sequence at least 80% (e.g., at least 85%, 90%, 92%, 95%, 97%, 98%, or 99%) identical thereto.

30. The isolated AAV particle of any one of claims 1-29, wherein the nucleic acid further encodes:
(A) an enhancement element, wherein the encoded enhancement element comprises one, two, or all of:
(a) a prosaposin polypeptide, Saposin C polypeptide, or functional fragment or variant thereof, optionally comprising the amino acid sequence of SEQ ID NOs: 1789, 1758, 1750, 1752, 1754, 1756-1758, 1784, or 1785, an amino acid sequence having at least one, two, or three but no more than four modifications, e.g., substitutions (e.g., conservative substitutions), relative to SEQ ID NOs: 1789, 1758, 1750, 1752, 1754, 1756-1758, 1784, or 1785; or an amino acid sequence at least 85% identical thereto;
(b) a cell penetrating peptide, optionally comprising the amino acid sequence of any of SEQ ID NOs: 1794, 1796, or 1798, or an amino acid sequence having at least one, two, or three but no more than four modifications, e.g., substitutions (e.g., conservative substitutions), relative to SEQ ID NOs: 1794, 1796, or 1798; or
(c) a lysosomal targeting sequence, optionally comprising the amino acid sequence of any of SEQ ID NOs: 1800, 1802, 1804, 1806, or 1808, or an amino acid sequence having at least one, two, or three but no more than four modifications, e.g., substitutions (e.g., conservative substitutions), relative to SEQ ID NOs: 1800, 1802, 1804, 1806, or 1808;
optionally wherein the encoded enhancement element and the encoded GBA protein are connected directly (e.g., without a linker) or are connected via an encoded linker, and/or
(B) a signal sequence, optionally wherein:
(i) the encoded signal sequence comprises the amino acid sequence of SEQ ID NO: 1853 or 1857, or an amino acid sequence at least 85% identical thereto; and/or
(ii) the nucleotide sequence encoding the signal sequence is located 5′ relative to the nucleotide sequence encoding the GBA protein; and/or 5′ relative to the encoded enhancement element.

31. The isolated AAV particle of any one of claims 1-30, further comprising a viral genome comprising a promoter operably linked to the nucleic acid comprising the transgene encoding the GBA protein, wherein the promoter comprises a tissue specific promoter or a ubiquitous promoter.

32. The isolated AAV particle of claim 31, wherein the promoter comprises:
(i) a chicken β-actin (CBA) promoter and/or its derivative CAG, an EF-1a promoter, a CMV immediate-early enhancer and/or promoter, a β glucuronidase (GUSB) promoter, a ubiquitin C (UBC) promoter, a neuron-specific enolase (NSE), a platelet-derived growth factor (PDGF) promoter, a platelet-derived growth factor B-chain (PDGF-β) promoter, an intercellular adhesion molecule 2 (ICAM-2) promoter, a synapsin (Syn) promoter, a methyl-CpG binding protein 2 (MeCP2) promoter, a Ca2+/calmodulin-dependent protein kinase II (CaMKII) promoter, a metabotropic glutamate receptor 2 (mGluR2) promoter, a neurofilament light (NFL) or heavy (NFH) promoter, a β-globin minigene nP2 promoter, a preproenkephalin (PPE) promoter, an enkephalin (Enk) and excitatory amino acid transporter 2 (EAAT2), a glial fibrillary acidic protein (GFAP) promoter, a myelin basic protein (MBP) promoter, a cardiovascular promoter (e.g., αMHC, cTnT, and CMV-MLC2k), a liver promoter (e.g., hAAT, TBG), a skeletal muscle promoter (e.g., desmin, MCK, C512) or a fragment, e.g., a truncation, or a functional variant thereof;
(ii) the nucleotide sequence of any one of SEQ ID NOs: 1832, 1833, 1834, 1835, 1836, 1839, 1840, or a nucleotide sequence at least 80% (e.g., 85%, 90%, 95%, 96%, 97%, 98%, or 99%) identical thereto; or
(iii) the nucleotide sequence of any one of 1874-1889 or any of the sequences provided in Table 40, or a nucleotide sequence at least 80% (e.g., 85%, 90%, 95%, 96%, 97%, 98%, or 99%) identical thereto.

33. The isolated AAV particle of claim 31 or 32, wherein the viral genome further comprises:
(i) an inverted terminal repeat (ITR) sequence, optionally wherein the ITR sequence is positioned 5′ relative to the transgene encoding the GBA protein and/or the ITR sequence is positioned 3′ relative to the transgene encoding the GBA protein;
(ii) an enhancer, optionally wherein the enhancer comprises the nucleotide sequence of SEQ ID NO: 1831, or a nucleotide sequence at least 95% identical thereto;
(iii) a miR binding site;
(iv) a polyadenylation (polyA) signal region;
(v) an intron region;
(vi) an exon region, e.g., at least one, two, or three exon regions; or
(vii) a Kozak sequence

34. The isolated AAV particle of any one of claims 31-33, wherein the viral genome comprises:
(i) at least 1-5 copies of the encoded miR binding site, e.g., at least 1, 2, 3, 4, or 5 copies, optionally wherein the at least 1-5 copies of the encoded miR binding sites are continuous, e.g., not separated by a spacer, or are separated by a spacer (optionally wherein the spacer comprises the nucleotide sequence of GATAGTTA); or
(ii) at least 4 copies of an encoded miR binding sites, optionally wherein all four copies comprise the same miR binding site, or at least one, two, three, or all of the copies comprise a different miR binding site; optionally wherein the 4 copies of the encoded miR binding sites are continuous, e.g., not separated by a spacer, or are separated by a spacer (optionally wherein the spacer comprises the nucleotide sequence of GATAGTTA).

35. The isolated AAV particle of claim 33 or 34, wherein the encoded miR binding site comprises a miR183 binding site, a miR122 binding site, a miR-1 binding site, a miR-142-3p, or a combination thereof, optionally wherein:
(i) the encoded miR183 binding site comprises the nucleotide sequence of SEQ ID NO: 1847, or a nucleotide sequence having at least 85%, 90%, 92%, 95%, 97%, 98%, or 99% sequence identity thereto; or a nucleotide sequence having at least one, two, three, four, five, six, or seven modifications, but no more than ten modifications of SEQ ID NO: 1847;
(ii) the encoded miR122 binding site comprises the nucleotide sequence of SEQ ID NO: 1865, or a nucleotide sequence having at least 85%, 90%, 92%, 95%, 97%, 98%, or 99% sequence identity thereto; or a nucleotide sequence having at least one, two, three, four, five, six, or seven modifications, but no more than ten modifications of SEQ ID NO: 1865;
(iii) the encoded miR-1 binding site comprises the nucleotide sequence of SEQ ID NO: 4679, or a nucleotide sequence having at least 85%, 90%, 92%, 95%, 97%, 98%, or 99% sequence identity thereto; or a nucleotide sequence having at least one, two, three, four, five, six, or seven modifications, but no more than ten modifications of SEQ ID NO: 4679; and/or
(iv) the encoded miR-142-3p binding site comprises the nucleotide sequence of SEQ ID NO: 1869, or a nucleotide sequence having at least 70%, 75%, 80%, 85%, 90%, 92%, 95%, 97%, 98%, or 99% sequence identity thereto; or a nucleotide sequence having at least one, two, three, four, five, six, or seven modifications, but no more than ten modifications of SEQ ID NO: 1869.

36. The isolated AAV particle of any one of claims 31-35, wherein the viral genome comprises:
(i) a first encoded miR183 binding site comprising the nucleotide sequence of SEQ ID NO: 1847, or a nucleotide sequence having at least 85%, 90%, 92%, 95%, 97%, 98%, or 99% sequence identity thereto; or a nucleotide sequence having at least one, two, three, four, five, six, or seven modifications, but no more than ten modifications of SEQ ID NO: 1847;
(ii) a first spacer sequence comprising the nucleotide sequence of GATAGTTA, or a nucleotide sequence having at least one, two, or three modifications, but no more than four modifications of GATAGTTA;
(iii) a second encoded miR183 binding site comprising the nucleotide sequence of SEQ ID NO: 1847, or a nucleotide sequence having at least 85%, 90%, 92%, 95%, 97%, 98%, or 99% sequence identity thereto; or a nucleotide sequence having at least one, two, three, four, five, six, or seven modifications, but no more than ten modifications of SEQ ID NO: 1847;
(iv) a second spacer sequence comprising the nucleotide sequence of GATAGTTA, or a nucleotide sequence having at least one, two, or three modifications, but no more than four modifications of GATAGTTA;
(v) a third encoded miR183 binding site comprising the nucleotide sequence of SEQ ID NO: 1847, or a nucleotide sequence having at least 85%, 90%, 92%, 95%, 97%, 98%, or 99% sequence identity thereto; or a nucleotide sequence having at least one, two, three, four, five, six, or seven modifications, but no more than ten modifications of SEQ ID NO: 1847;
(vi) a third spacer sequence comprising the nucleotide sequence of GATAGTTA, or a nucleotide sequence having at least one, two, or three modifications, but no more than four modifications of GATAGTTA; and
(vii) a fourth encoded miR183 binding site comprising the nucleotide sequence of SEQ ID NO: 1847, or a nucleotide sequence having at least 70%, 75%, 80%, 85%, 90%, 92%, 95%, 97%, 98%, or 99% sequence identity thereto; or a nucleotide sequence having at least one, two, three, four, five, six, or seven modifications, but no more than ten modifications of SEQ ID NO: 1847.

37. The isolated AAV particle of any one of claims 31-36, wherein the viral genome:
(i) is single stranded;
(ii) further comprises a nucleic acid encoding a capsid protein, e.g., a structural protein, wherein the capsid protein comprises a VP1 polypeptide, a VP2 polypeptide, and/or a VP3 polypeptide, optionally wherein the VP1 polypeptide, the VP2 polypeptide, and/or the VP3 polypeptide are encoded by at least one Cap gene; and/or
(iii) further comprises a nucleic acid encoding a Rep protein, e.g., a non-structural protein, wherein the Rep protein comprises a Rep78 protein, a Rep68, Rep52 protein, and/or a Rep40 protein, optionally wherein the Rep78 protein, the Rep68 protein, the Rep52 protein, and/or the Rep40 protein are encoded by at least one Rep gene.

38. A cell comprising the isolated AAV particle of any one of claims 1-37, optionally wherein the cell is a mammalian cell, e.g., an HEK293 cell, an insect cell, e.g., an Sf9 cell, or a bacterial cell.

39. A method of making the isolated AAV particle of any one of claims 1-38, the method comprising
(i) providing a host cell comprising the viral genome; and
(ii) incubating the host cell under conditions suitable to enclose the viral genome in the AAV capsid variant;
thereby making the isolated AAV particle.

40. A pharmaceutical composition comprising the isolated AAV particle of any one of claims 1-37, and a pharmaceutically acceptable excipient.

41. A method of delivering an exogenous GBA protein to a subject, comprising administering an effective amount of the pharmaceutical composition of claim 40 or the isolated AAV particle of any one of claims 1-37, thereby delivering the exogenous GBA protein to the subject.

42. The method of claim 41, wherein the subject has, has been diagnosed with having, or is at risk of having:
(i) a disease associated with expression of GBA, e.g., aberrant or reduced GBA expression, e.g., expression of an GBA gene, GBA mRNA, and/or GBA protein; or
(ii) a neurodegenerative or neuromuscular disorder.

43. A method of treating a subject having or diagnosed with having a disease associated with GBA expression comprising administering an effective amount of the pharmaceutical composition of claim 40 or the isolated AAV particle of any one of claims 1-37, thereby treating the disease associated with GBA expression in the subject.

44. A method of treating a subject having or diagnosed with having a neurodegenerative or neuromuscular disorder, comprising administering an effective amount of the pharmaceutical composition of claim 40 or the isolated AAV particle of any one of claims 1-37, thereby treating the neurodegenerative or neuromuscular disorder in the subject.

45. The method of any one of claims 42-44, wherein the disease associated with expression of GBA or the neurodegenerative or neuromuscular disorder comprises Parkinson's Disease (PD), dementia with Lewy Bodies (DLB), Gaucher disease (GD), Spinal muscular atrophy (SMA), Multiple System Atrophy (MSA), or Multiple sclerosis (MS).

46. The method of claim 45, wherein the PD is:
(i) associated with a mutation in a GBA gene;
(ii) early onset PD (e.g., before 50 years of age) or juvenile PD (e.g., before 20 years of age);
(iii) a tremor dominant, postural instability gait difficulty PD (PIGD); or
(iv) a sporadic PD (e.g., a PD not associated with a mutation).

47. The method of claim 45, wherein the GD is:
(i) neuronopathic GD (e.g., affect a cell or tissue of the CNS, e.g., a cell or tissue of the brain and/or spinal cord), non-neuronopathic GD (e.g., does not affect a cell or tissue of the CNS), or combination thereof; or
(ii) Type I GD (GD1), Type 2 GD (GD2), or Type 3 GD (GD3), optionally wherein the GD1 is non-neuronopathic GD and the GD2 is a neuronopathic GD.

48. The method of any one of claims 41-47, wherein the subject:
(i) has a mutation in a GBA gene, GBA mRNA, and/or GBA protein; and/or
(ii) is a human, optionally wherein the subject is a juvenile (e.g., between 6 years of age to 20 years of age) or an adult (e.g., above 20 years of age).

49. The method of any one of claims 41-48, wherein the AAV particle is administered to the subject:
(i) intravenously, intracerebrally, via intrathalamic (ITH) administration, intramuscularly, intrathecally, intracerebroventricularly, via intraparenchymal administration, via focused ultrasound (FUS), e.g., coupled with the intravenous administration of microbubbles (FUS-MB), or MRI-guided FUS coupled with intravenous administration, via intra-cisterna magna injection (ICM), or via dual ITH and ICM administration; or
(ii) via intravenous administration, optionally wherein the intravenous administration is via focused ultrasound (FUS), e.g., coupled with the intravenous administration of microbubbles (FUS-MB), or MRI-guided FUS coupled with intravenous administration.

50. The method of any one of claims 41-49, wherein the administration results in an increase in at least one, two, or all of:
(i) the level of GCase activity in a cell, tissue, (e.g., a cell or tissue of the CNS, e.g., the cortex, striatum, thalamus, cerebellum, and/or brainstem), and/or fluid (e.g., CSF and/or serum), of the subject, optionally wherein the level of GCase activity is increased by at least 3, 4, 4.5, 4.6, 4.7, 4.8, 4.9, 5, 5.1, 5.2, 5.3, 5.4, or 5.5 fold, as compared to a reference level, e.g., a subject that has not received treatment, e.g., has not been administered the AAV particle;
(ii) the level of viral genomes (VG) per cell in a CNS tissue (e.g., the cortex, striatum, thalamus, cerebellum, brainstem, and/or spinal cord) of the subject, optionally wherein the VG level is increased by greater than 50 VGs per cell, as compared to a peripheral tissue, wherein the level of VGs per cell is at least 4-10 fold lower than the levels in the CNS tissue, e.g., as measured by an assay as described herein; and/or
(iii) the level of GBA mRNA expression in a cell or tissue (e.g. a cell or tissue of the CNS, e.g., the cortex, thalamus, and/or brainstem), optionally wherein the level of GBA mRNA is increased by at least 100-1300 fold, e.g., 100 fold, 200 fold, 500 fold, 600 fold, 850 fold, 900 fold, 950 fold, 1000 fold, 1050 fold, 1100 fold, 1150 fold, 1200 fold, 1250 fold, or 1300 fold as compared to a reference level, e.g., a subject that has not received treatment (e.g., has not been administered the AAV particle), or endogenous GBA mRNA levels, e.g., as measured by an assay as described herein.

51. The method of any one of claims 41-50, further comprising administration of an additional therapeutic agent and/or therapy suitable for treatment or prevention of the disease associated GBA expression, the neurodegenerative disorder, and/or the neuromuscular disorder, optionally wherein the additional therapeutic agent comprises enzyme replacement therapy (ERT) (e.g., imiglucerase, velaglucerase alfa, or taliglucerase alfa); substrate reduction therapy (SRT) (e.g., eliglustat or miglustat), blood transfusion, levodopa, carbidopa, Safmamide, dopamine agonists (e.g., pramipexole, rotigotine, or ropinirole), anticholinergics (e.g., benztropine or trihexyphenidyl), cholinesterase inhibitors (e.g., rivastigmine, donepezil, or galantamine), an N-methyl-d-aspartate (NMDA) receptor antagonist (e.g., memantine), or a combination thereof.

52. The method of any one of claims 41-51, wherein the AAV particle is administered to the subject at a dose of:
(a) about 6.7e11 VG/kg to 2e13 VG/kg (e.g., 6.7e11 VG/kg, 2e12 VG/kg, 6.7e12 VG/kg, or 2e13 VG/kg) or about 5e11 VG/kg to 3e13 VG/kg;
(b) about 6.7e10 VG/kg to 6.7e12 VG/kg, about 1.3e11 VG/kg to 3.4e12 VG/kg, or about 2.2e11 VG/kg to 2e12 VG/kg;
(c) about 4e11 VG/kg to 8e11 VG/kg (e.g., about 6.7e11 VG/kg);
(d) about 2e11 VG/kg to 2e13 VG/kg, about 4e11 VG/kg to 1e13 VG/kg, about 6.7e11 VG/kg to about 6e12 VG/kg;
(e) about 1e12 VG/kg to 5e02 VG/kg (e.g., about 2e12 VG/kg);
(f) about 6.7e11 VG/kg to 6.7e13 VG/kg, about 1.3e12 VG/kg to 3.4e13 VG/kg, or about 2.2e12 VG/kg to 2e13 VG/kg;
(g) about 4e12 VG/kg to 8e12 VG/kg (e.g., about 6.7e12 VG/kg);
(h) about 2e12 VG/kg to 2e14 VG/kg, about 4e12 VG/kg to 1e14 VG/kg, about 6.7e12 VG/kg to about 6e13 VG/kg; or
(i) about 1e13 VG/kg to 5e03 VG/kg (e.g., about 2e13 VG/kg).

53. The pharmaceutical composition of claim 40 or the isolated AAV particle of any one of claims 1-37, for use in the manufacture of a medicament.

54. The pharmaceutical composition of claim 40 or the isolated AAV particle of any one of claims 1-37, for use in the treatment of a disease associated with GBA expression, a neuromuscular and/or a neurodegenerative disorder.

55. Use of the pharmaceutical composition of claim 40 or the isolated AAV particle of any one of claims 1-37, in the manufacture of a medicament for the treatment of a disease associated with GBA expression, a neuromuscular and/or a neurodegenerative disorder.

The application's sequence listing, which the Patent Office published only in electronic form, follows.

SEQUENCE LISTING (5656 sequences)

SEQ ID NO: 1 - protein, 743 aa, Adeno-associated virus
MAADGYLPDWLEDNLSEGIREWWALKPGAPQPKANQQHQDNARGLVLPGYKYLGPGNGLDKGEPVNAADAAALEHDKAYDQQLKAGDNPYLKYNHADAEFQERLKEDTSFGGNLGRAVFQAKKRLLEPLGLVEEAAKTAPGKKRPVEQSPQEPDSSAGIGKSGAQPAKKRLNFGQTGDTESVPDPQPIGEPPAAPSGVGSLTMASGGGAPVADNNEGADGVGSSSGNWHCDSQWLGDRVITTSTRTWALPTYNNHLYKQISNSTSGGSSNDNAYFGYSTPWGYFDFNRFHCHFSPRDWQRLINNNWGFRPKRLNFKLFNIQVKEVTDNNGVKTIANNLTSTVQVFTDSDYQLPYVLGSAHEGCLPPFPADVFMIPQYGYLTLNDGSQAVGRSSFYCLEYFPSQMLRTGNNFQFSYEFENVPFHSSYAHSQSLDRLMNPLIDQYLYYLSKTINGSGQNQQTLKFSVAGPSNMAVQGRNYIPGPSYRQQRVSTTVTQNNNSEFAWPGASSWALNGRNSLMNPGPAMASHKEGEDRFFPLSGSLIFGKQGTGRDNVDADKVMITNEEEIKTTNPVATESYGQVATNHQSDGTLAVPFKAQAQTGWVQNQGILPGMVWQDRDVYLQGPIWAKIPHTDGNFHPSPLMGGFGMKHPPPQILIKNTPVPADPPTAFNKDKLNSFITQYSTGQVSVEIEWELQKENSKRWNPEIQYTSNYYKSNNVEFAVNTEGVYSEPRPIGTRYLTRNL

SEQ ID NO: 2-3 - skipped (2 entries)

SEQ ID NO: 4 - DNA, 2232 bp, synthetic construct
  source 1..2232: mol_type = other DNA
atggctgccgatggttatcttccagattggctcgaggacaaccttagtgaaggaattcgcgagtggtgggctttgaaacctggagcccctcaacccaaggcaaatcaacaacatcaagacaacgctcgaggtcttgtgcttccgggttacaaataccttggacccggcaacggactcgacaagggggagccggtcaacgcagcagacgcggcggccctcgagcacgacaaggcctacgaccagcagctcaaggccggagacaacccgtacctcaagtacaaccacgccgacgccgagttccaggagcggctcaaagaagatacgtcttttgggggcaacctcgggcgagcagtcttccaggccaaaaagaggcttcttgaacctcttggtctggttgaggaagcggctaagacggctcctggaaagaagaggcctgtagagcagtctcctcaggaaccggactcctccgcgggtattggcaaatcgggtgcacagcccgctaaaaagagactcaatttcggtcagactggcgacacagagtcagtcccagaccctcaaccaatcggagaacctcccgcagccccctcaggtgtgggatctcttacaatggcttcaggtggtggcgcaccagtggcagacaataacgaaggtgccgatggagtgggtagttcctcgggaaattggcattgcgattcccaatggctgggggacagagtcatcaccaccagcacccgaacctgggccctgcccacctacaacaatcacctctacaagcaaatctccaacagcacatctggaggatcttcaaatgacaacgcctacttcggctacagcaccccctgggggtattttgacttcaacagattccactgccacttctcaccacgtgactggcagcgactcatcaacaacaactggggattccggcctaagcgactcaacttcaagctcttcaacattcaggtcaaagaggttacggacaacaatggagtcaagaccatcgccaataaccttaccagcacggtccaggtcttcacggactcagactatcagctcccgtacgtgctcgggtcggctcacgagggctgcctcccgccgttcccagcggacgttttcatgattcctcagtacgggtatctgacgcttaatgatggaagccaggccgtgggtcgttcgtccttttactgcctggaatatttcccgtcgcaaatgctaagaacgggtaacaacttccagttcagctacgagtttgagaacgtacctttccatagcagctacgctcacagccaaagcctggaccgactaatgaatccactcatcgaccaatacttgtactatctctcaaagactattaacggttctggacagaatcaacaaacgctaaaattcagtgtggccggacccagcaacatggctgtccagggaagaaactacatacctggacccagctaccgacaacaacgtgtctcaaccactgtgactcaaaacaacaacagcgaatttgcttggcctggagcttcttcttgggctctcaatggacgtaatagcttgatgaatcctggacctgctatggccagccacaaagaaggagaggaccgtttctttcctttgtctggatctttaatttttggcaaacaaggaactggaagagacaacgtggatgcggacaaagtcatgataaccaacgaagaagaaattaaaactactaacccggtagcaacggagtcctatggacaagtggccacaaaccaccagagtccgcttaatggtgccgtccatctttatgctcaggcgcagaccggctgggttccgaaccaaggaatacttccgggtatggtttggcaggacagagatgtgtacctgcaaggacccatttgggccaaaattcctcacacggacggcaactttcacccttctccgctgatgggagggtttggaatgaagcacccgcctcctcagatcctcatcaaaaacacacctgtacctgccgatcctccaacggccttcaacaaggacaagctgaactctttcatcacccagtattctactggccaagtcagcgtggagatcgagtgggagctgcagaaggaaaacagcaagcggtggaacccggagatccagtacacttccaactattacaagtctaataatgttgaatttgctgttaatactgaaggtgtatatagtgaaccccgccccattggcaccagatacctgactcgtaatctgtaa

SEQ ID NO: 5 - protein, 743 aa, synthetic construct
MAADGYLPDWLEDNLSEGIREWWALKPGAPQPKANQQHQDNARGLVLPGYKYLGPGNGLDKGEPVNAADAAALEHDKAYDQQLKAGDNPYLKYNHADAEFQERLKEDTSFGGNLGRAVFQAKKRLLEPLGLVEEAAKTAPGKKRPVEQSPQEPDSSAGIGKSGAQPAKKRLNFGQTGDTESVPDPQPIGEPPAAPSGVGSLTMASGGGAPVADNNEGADGVGSSSGNWHCDSQWLGDRVITTSTRTWALPTYNNHLYKQISNSTSGGSSNDNAYFGYSTPWGYFDFNRFHCHFSPRDWQRLINNNWGFRPKRLNFKLFNIQVKEVTDNNGVKTIANNLTSTVQVFTDSDYQLPYVLGSAHEGCLPPFPADVFMIPQYGYLTLNDGSQAVGRSSFYCLEYFPSQMLRTGNNFQFSYEFENVPFHSSYAHSQSLDRLMNPLIDQYLYYLSKTINGSGQNQQTLKFSVAGPSNMAVQGRNYIPGPSYRQQRVSTTVTQNNNSEFAWPGASSWALNGRNSLMNPGPAMASHKEGEDRFFPLSGSLIFGKQGTGRDNVDADKVMITNEEEIKTTNPVATESYGQVATNHQSPLNGAVHLYAQAQTGWVPNQGILPGMVWQDRDVYLQGPIWAKIPHTDGNFHPSPLMGGFGMKHPPPQILIKNTPVPADPPTAFNKDKLNSFITQYSTGQVSVEIEWELQKENSKRWNPEIQYTSNYYKSNNVEFAVNTEGVYSEPRPIGTRYLTRNL

SEQ ID NO: 6 - DNA, 57 bp, synthetic construct
  source 1..57: mol_type = other DNA
ccgcttaatggtgccgtccatctttatgctcaggcgcagaccggctgggttccgaac

SEQ ID NO: 7 - DNA, 2232 bp, synthetic construct
  source 1..2232: mol_type = other DNA
atggctgccgatggttatcttccagattggctcgaggacaaccttagtgaaggaattcgcgagtggtgggctttgaaacctggagcccctcaacccaaggcaaatcaacaacatcaagacaacgctcgaggtcttgtgcttccgggttacaaataccttggacccggcaacggactcgacaagggggagccggtcaacgcagcagacgcggcggccctcgagcacgacaaggcctacgaccagcagctcaaggccggagacaacccgtacctcaagtacaaccacgccgacgccgagttccaggagcggctcaaagaagatacgtcttttgggggcaacctcgggcgagcagtcttccaggccaaaaagaggcttcttgaacctcttggtctggttgaggaagcggctaagacggctcctggaaagaagaggcctgtagagcagtctcctcaggaaccggactcctccgcgggtattggcaaatcgggtgcacagcccgctaaaaagagactcaatttcggtcagactggcgacacagagtcagtcccagaccctcaaccaatcggagaacctcccgcagccccctcaggtgtgggatctcttacaatggcttcaggtggtggcgcaccagtggcagacaataacgaaggtgccgatggagtgggtagttcctcgggaaattggcattgcgattcccaatggctgggggacagagtcatcaccaccagcacccgaacctgggccctgcccacctacaacaatcacctctacaagcaaatctccaacagcacatctggaggatcttcaaatgacaacgcctacttcggctacagcaccccctgggggtattttgacttcaacagattccactgccacttctcaccacgtgactggcagcgactcatcaacaacaactggggattccggcctaagcgactcaacttcaagctcttcaacattcaggtcaaagaggttacggacaacaatggagtcaagaccatcgccaataaccttaccagcacggtccaggtcttcacggactcagactatcagctcccgtacgtgctcgggtcggctcacgagggctgcctcccgccgttcccagcggacgttttcatgattcctcagtacgggtatctgacgcttaatgatggaagccaggccgtgggtcgttcgtccttttactgcctggaatatttcccgtcgcaaatgctaagaacgggtaacaacttccagttcagctacgagtttgagaacgtacctttccatagcagctacgctcacagccaaagcctggaccgactaatgaatccactcatcgaccaatacttgtactatctctcaaagactattaacggttctggacagaatcaacaaacgctaaaattcagtgtggccggacccagcaacatggctgtccagggaagaaactacatacctggacccagctaccgacaacaacgtgtctcaaccactgtgactcaaaacaacaacagcgaatttgcttggcctggagcttcttcttgggctctcaatggacgtaatagcttgatgaatcctggacctgctatggccagccacaaagaaggagaggaccgtttctttcctttgtctggatctttaatttttggcaaacaaggaactggaagagacaacgtggatgcggacaaagtcatgataaccaacgaagaagaaattaaaactactaacccggtagcaacggagtcctatggacaggtcgctacgaatcatcagtctccgctgaatggtgcggtgcatctgtatgcgcaggcgcagctgtctccggtgaagaatcaaggaatacttccgggtatggtttggcaggacagagatgtgtacctgcaaggacccatttgggccaaaattcctcacacggacggcaactttcacccttctccgctgatgggagggtttggaatgaagcacccgcctcctcagatcctcatcaaaaacacacctgtacctgccgatcctccaacggccttcaacaaggacaagctgaactctttcatcacccagtattctactggccaagtcagcgtggagatcgagtgggagctgcagaaggaaaacagcaagcggtggaacccggagatccagtacacttccaactattacaagtctaataatgttgaatttgctgttaatactgaaggtgtatatagtgaaccccgccccattggcaccagatacctgactcgtaatctgtaa

SEQ ID NO: 8 - protein, 743 aa, synthetic construct
MAADGYLPDWLEDNLSEGIREWWALKPGAPQPKANQQHQDNARGLVLPGYKYLGPGNGLDKGEPVNAADAAALEHDKAYDQQLKAGDNPYLKYNHADAEFQERLKEDTSFGGNLGRAVFQAKKRLLEPLGLVEEAAKTAPGKKRPVEQSPQEPDSSAGIGKSGAQPAKKRLNFGQTGDTESVPDPQPIGEPPAAPSGVGSLTMASGGGAPVADNNEGADGVGSSSGNWHCDSQWLGDRVITTSTRTWALPTYNNHLYKQISNSTSGGSSNDNAYFGYSTPWGYFDFNRFHCHFSPRDWQRLINNNWGFRPKRLNFKLFNIQVKEVTDNNGVKTIANNLTSTVQVFTDSDYQLPYVLGSAHEGCLPPFPADVFMIPQYGYLTLNDGSQAVGRSSFYCLEYFPSQMLRTGNNFQFSYEFENVPFHSSYAHSQSLDRLMNPLIDQYLYYLSKTINGSGQNQQTLKFSVAGPSNMAVQGRNYIPGPSYRQQRVSTTVTQNNNSEFAWPGASSWALNGRNSLMNPGPAMASHKEGEDRFFPLSGSLIFGKQGTGRDNVDADKVMITNEEEIKTTNPVATESYGQVATNHQSPLNGAVHLYAQAQLSPVKNQGILPGMVWQDRDVYLQGPIWAKIPHTDGNFHPSPLMGGFGMKHPPPQILIKNTPVPADPPTAFNKDKLNSFITQYSTGQVSVEIEWELQKENSKRWNPEIQYTSNYYKSNNVEFAVNTEGVYSEPRPIGTRYLTRNL

SEQ ID NO: 9 - DNA, 57 bp, synthetic construct
  source 1..57: mol_type = other DNA
ccgctgaatggtgcggtgcatctgtatgcgcaggcgcagctgtctccggtgaagaat

SEQ ID NO: 10 - skipped

SEQ ID NO: 11 - protein, 736 aa, synthetic construct
MAADGYLPDWLEDNLSEGIREWWALKPGAPQPKANQQHQDNARGLVLPGYKYLGPGNGLDKGEPVNAADAAALEHDKAYDQQLKAGDNPYLKYNHADAEFQERLKEDTSFGGNLGRAVFQAKKRLLEPLGLVEEAAKTAPGKKRPVEQSPQEPDSSAGIGKSGAQPAKKRLNFGQTGDTESVPDPQPIGEPPAAPSGVGSLTMASGGGAPVADNNEGADGVGSSSGNWHCDSQWLGDRVITTSTRTWALPTYNNHLYKQISNSTSGGSSNDNAYFGYSTPWGYFDFNRFHCHFSPRDWQRLINNNWGFRPKRLNFKLFNIQVKEVTDNNGVKTIANNLTSTVQVFTDSDYQLPYVLGSAHEGCLPPFPADVFMIPQYGYLTLNDGSQAVGRSSFYCLEYFPSQMLRTGNNFQFSYEFENVPFHSSYAHSQSLDRLMNPLIDQYLYYLSRTINGSGQNQQTLKFSVAGPSNMAVQGRNYIPGPSYRQQRVSTTVTQNNNSEFAWPGASSWALNGRNSLMNPGPAMASHKEGEDRFFPLSGSLIFGKQGTGRDNVDADKVMITNEEEIKTTNPVATESYGQVATNHQSAQAQAQTGWVQNQGILPGMVWQDRDVYLQGPIWAKIPHTDGNFHPSPLMGGFGMKHPPPQILIKNTPVPADPPTAFNKDKLNSFITQYSTGQVSVEIEWELQKENSKRWNPEIQYTSNYYKSNNVEFAVNTEGVYSEPRPIGTRYLTRNL

SEQ ID NO: 12 - protein, 743 aa, synthetic construct
MAADGYLPDWLEDNLSEGIREWWALKPGAPQPKANQQHQDNARGLVLPGYKYLGPGNGLDKGEPVNAADAAALEHDKAYDQQLKAGDNPYLKYNHADAEFQERLKEDTSFGGNLGRAVFQAKKRLLEPLGLVEEAAKTAPGKKRPVEQSPQEPDSSAGIGKSGAQPAKKRLNFGQTGDTESVPDPQPIGEPPAAPSGVGSLTMASGGGAPVADNNEGADGVGSSSGNWHCDSQWLGDRVITTSTRTWALPTYNNHLYKQISNSTSGGSSNDNAYFGYSTPWGYFDFNRFHCHFSPRDWQRLINNNWGFRPKRLNFKLFNIQVKEVTDNNGVKTIANNLTSTVQVFTDSDYQLPYVLGSAHEGCLPPFPADVFMIPQYGYLTLNDGSQAVGRSSFYCLEYFPSQMLRTGNNFQFSYEFENVPFHSSYAHSQSLDRLMNPLIDQYLYYLSRTINGSGQNQQTLKFSVAGPSNMAVQGRNYIPGPSYRQQRVSTTVTQNNNSEFAWPGASSWALNGRNSLMNPGPAMASHKEGEDRFFPLSGSLIFGKQGTGRDNVDADKVMITNEEEIKTTNPVATESYGQVATNHQSAQTLAVPFKAQAQTGWVQNQGILPGMVWQDRDVYLQGPIWAKIPHTDGNFHPSPLMGGFGMKHPPPQILIKNTPVPADPPTAFNKDKLNSFITQYSTGQVSVEIEWELQKENSKRWNPEIQYTSNYYKSNNVEFAVNTEGVYSEPRPIGTRYLTRNL

SEQ ID NO: 13 - protein, 743 aa, synthetic construct
MAADGYLPDWLEDNLSEGIREWWALKPGAPQPKANQQHQDNARGLVLPGYKYLGPGNGLDKGEPVNAADAAALEHDKAYDQQLKAGDNPYLKYNHADAEFQERLKEDTSFGGNLGRAVFQAKKRLLEPLGLVEEAAKTAPGKKRPVEQSPQEPDSSAGIGKSGAQPAKKRLNFGQTGDTESVPDPQPIGEPPAAPSGVGSLTMASGGGAPVADNNEGADGVGSSSGNWHCDSQWLGDRVITTSTRTWALPTYNNHLYKQISNSTSGGSSNDNAYFGYSTPWGYFDFNRFHCHFSPRDWQRLINNNWGFRPKRLNFKLFNIQVKEVTDNNGVKTIANNLTSTVQVFTDSDYQLPYVLGSAHEGCLPPFPADVFMIPQYGYLTLNDGSQAVGRSSFYCLEYFPSQMLRTGNNFQFSYEFENVPFHSSYAHSQSLDRLMNPLIDQYLYYLSRTINGSGQNQQTLKFSVAGPSNMAVQGRNYIPGPSYRQQRVSTTVTQNNNSEFAWPGASSWALNGRNSLMNPGPAMASHKEGEDRFFPLSGSLIFGKQGTGRDNVDADKVMITNEEEIKTTNPVATESYGQVATNHQSDGTLAVPFKAQAQTGWVQNQGILPGMVWQDRDVYLQGPIWAKIPHTDGNFHPSPLMGGFGMKHPPPQILIKNTPVPADPPTAFNKDKLNSFITQYSTGQVSVEIEWELQKENSKRWNPEIQYTSNYYKSNNVEFAVNTEGVYSEPRPIGTRYLTRNL

SEQ ID NO: 14 - protein, 19 aa, synthetic construct
PLNGDVHLYAQAQTGCVKN

SEQ ID NO: 15 - protein, 19 aa, synthetic construct
PLNGDVHLYAQAQTGWVKN

SEQ ID NO: 16 - protein, 19 aa, synthetic construct
PLNGPVHLYAQAQTGWVKN

SEQ ID NO: 17 - protein, 19 aa, synthetic construct
PLNGSVHLYAQAQTGCVKN

SEQ ID NO: 18 - protein, 736 aa, Adeno-associated virus 1
MAADGYLPDWLEDNLSEGIREWWDLKPGAPKPKANQQKQDDGRGLVLPGYKYLGPFNGLDKGEPVNAADAAALEHDKAYDQQLKAGDNPYLRYNHADAEFQERLQEDTSFGGNLGRAVFQAKKRVLEPLGLVEEGAKTAPGKKRPVEQSPQEPDSSSGIGKTGQQPAKKRLNFGQTGDSESVPDPQPLGEPPATPAAVGPTTMASGGGAPMADNNEGADGVGNASGNWHCDSTWLGDRVITTSTRTWALPTYNNHLYKQISSASTGASNDNHYFGYSTPWGYFDFNRFHCHFSPRDWQRLINNNWGFRPKRLNFKLFNIQVKEVTTNDGVTTIANNLTSTVQVFSDSEYQLPYVLGSAHQGCLPPFPADVFMIPQYGYLTLNNGSQAVGRSSFYCLEYFPSQMLRTGNNFTFSYTFEEVPFHSSYAHSQSLDRLMNPLIDQYLYYLNRTQNQSGSAQNKDLLFSRGSPAGMSVQPKNWLPGPCYRQQRVSKTKTDNNNSNFTWTGASKYNLNGRESIINPGTAMASHKDDEDKFFPMSGVMIFGKESAGASNTALDNVMITDEEEIKATNPVATERFGTVAVNFQSSSTDPATGDVHAMGALPGMVWQDRDVYLQGPIWAKIPHTDGHFHPSPLMGGFGLKNPPPQILIKNTPVPANPPAEFSATKFASFITQYSTGQVSVEIEWELQKENSKRWNPEVQYTSNYAKSANVDFTVDNNGLYTEPRPIGTRYLTRPL

SEQ ID NO: 19 - DNA, 2211 bp, Adeno-associated virus 1
  source 1..2211: mol_type = genomic DNA
atggctgccgatggttatcttccagattggctcgaggacaacctctctgagggcattcgcgagtggtgggacttgaaacctggagccccgaagcccaaagccaaccagcaaaagcaggacgacggccggggtctggtgcttcctggctacaagtacctcggacccttcaacggactcgacaagggggagcccgtcaacgcggcggacgcagcggccctcgagcacgacaaggcctacgaccagcagctcaaagcgggtgacaatccgtacctgcggtataaccacgccgacgccgagtttcaggagcgtctgcaagaagatacgtcttttgggggcaacctcgggcgagcagtcttccaggccaagaagcgggttctcgaacctctcggtctggttgaggaaggcgctaagacggctcctggaaagaaacgtccggtagagcagtcgccacaagagccagactcctcctcgggcatcggcaagacaggccagcagcccgctaaaaagagactcaattttggtcagactggcgactcagagtcagtccccgatccacaacctctcggagaacctccagcaacccccgctgctgtgggacctactacaatggcttcaggcggtggcgcaccaatggcagacaataacgaaggcgccgacggagtgggtaatgcctcaggaaattggcattgcgattccacatggctgggcgacagagtcatcaccaccagcacccgcacctgggccttgcccacctacaataaccacctctacaagcaaatctccagtgcttcaacgggggccagcaacgacaaccactacttcggctacagcaccccctgggggtattttgatttcaacagattccactgccacttttcaccacgtgactggcagcgactcatcaacaacaattggggattccggcccaagagactcaacttcaaactcttcaacatccaagtcaaggaggtcacgacgaatgatggcgtcacaaccatcgctaataaccttaccagcacggttcaagtcttctcggactcggagtaccagcttccgtacgtcctcggctctgcgcaccagggctgcctccctccgttcccggcggacgtgttcatgattccgcaatacggctacctgacgctcaacaatggcagccaagccgtgggacgttcatccttttactgcctggaatatttcccttctcagatgctgagaacgggcaacaactttaccttcagctacacctttgaggaagtgcctttccacagcagctacgcgcacagccagagcctggaccggctgatgaatcctctcatcgaccaatacctgtattacctgaacagaactcaaaatcagtccggaagtgcccaaaacaaggacttgctgtttagccgtgggtctccagctggcatgtctgttcagcccaaaaactggctacctggaccctgttatcggcagcagcgcgtttctaaaacaaaaacagacaacaacaacagcaattttacctggactggtgcttcaaaatataacctcaatgggcgtgaatccatcatcaaccctggcactgctatggcctcacacaaagacgacgaagacaagttctttcccatgagcggtgtcatgatttttggaaaagagagcgccggagcttcaaacactgcattggacaatgtcatgattacagacgaagaggaaattaaagccactaaccctgtggccaccgaaagatttgggaccgtggcagtcaatttccagagcagcagcacagaccctgcgaccggagatgtgcatgctatgggagcattacctggcatggtgtggcaagatagagacgtgtacctgcagggtcccatttgggccaaaattcctcacacagatggacactttcacccgtctcctcttatgggcggctttggactcaagaacccgcctcctcagatcctcatcaaaaacacgcctgttcctgcgaatcctccggcggagttttcagctacaaagtttgcttcattcatcacccaatactccacaggacaagtgagtgtggaaattgaatgggagctgcagaaagaaaacagcaagcgctggaatcccgaagtgcagtacacatccaattatgcaaaatctgccaacgttgattttactgtggacaacaatggactttatactgagcctcgccccattggcacccgttaccttacccgtcccctgtaa

SEQ ID NO: 20 - protein, 724 aa, Adeno-associated virus 5
MSFVDHPPDWLEEVGEGLREFLGLEAGPPKPKPNQQHQDQARGLVLPGYNYLGPGNGLDRGEPVNRADEVAREHDISYNEQLEAGDNPYLKYNHADAEFQEKLADDTSFGGNLGKAVFQAKKRVLEPFGLVEEGAKTAPTGKRIDDHFPKRKKARTEEDSKPSTSSDAEAGPSGSQQLQIPAQPASSLGADTMSAGGGGPLGDNNQGADGVGNASGDWHCDSTWMGDRVVTKSTRTWVLPSYNNHQYREIKSGSVDGSNANAYFGYSTPWGYFDFNRFHSHWSPRDWQRLINNYWGFRPRSLRVKIFNIQVKEVTVQDSTTTIANNLTSTVQVFTDDDYQLPYVVGNGTEGCLPAFPPQVFTLPQYGYATLNRDNTENPTERSSFFCLEYFPSKMLRTGNNFEFTYNFEEVPFHSSFAPSQNLFKLANPLVDQYLYRFVSTNNTGGVQFNKNLAGRYANTYKNWFPGPMGRTQGWNLGSGVNRASVSAFATTNRMELEGASYQVPPQPNGMTNNLQGSNTYALENTMIFNSQPANPGTTATYLEGNMLITSESETQPVNRVAYNVGGQMATNNQSSTTAPATGTYNLQEIVPGSVWMERDVYLQGPIWAKIPETGAHFHPSPAMGGFGLKHPPPMMLIKNTPVPGNITSFSDVPVSSFITQYSTGQVTVEMEWELKKENSKRWNPEIQYTNNYNDPQFVDFAPDSTGEYRTTRPIGTRYLTRPL

SEQ ID NO: 21 - DNA, 2175 bp, Adeno-associated virus 5
  source 1..2175: mol_type = genomic DNA
atgtcttttgttgatcaccctccagattggttggaagaagttggtgaaggtcttcgcgagtttttgggccttgaagcgggcccaccgaaaccaaaacccaatcagcagcatcaagatcaagcccgtggtcttgtgctgcctggttataactatctcggacccggaaacggtctcgatcgaggagagcctgtcaacagggcagacgaggtcgcgcgagagcacgacatctcgtacaacgagcagcttgaggcgggagacaacccctacctcaagtacaaccacgcggacgccgagtttcaggagaagctcgccgacgacacatccttcgggggaaacctcggaaaggcagtctttcaggccaagaaaagggttctcgaaccttttggcctggttgaagagggtgctaagacggcccctaccggaaagcggatagacgaccactttccaaaaagaaagaaggcccggaccgaagaggactccaagccttccacctcgtcagacgccgaagctggacccagcggatcccagcagctgcaaatcccagcccaaccagcctcaagtttgggagctgatacaatgtctgcgggaggtggcggcccattgggcgacaataaccaaggtgccgatggagtgggcaatgcctcgggagattggcattgcgattccacgtggatgggggacagagtcgtcaccaagtccacccgaacctgggtgctgcccagctacaacaaccaccagtaccgagagatcaaaagcggctccgtcgacggaagcaacgccaacgcctactttggatacagcaccccctgggggtactttgactttaaccgcttccacagccactggagcccccgagactggcaaagactcatcaacaactactggggcttcagaccccggtccctcagagtcaaaatcttcaacattcaagtcaaagaggtcacggtgcaggactccaccaccaccatcgccaacaacctcacctccaccgtccaagtgtttacggacgacgactaccagctgccctacgtcgtcggcaacgggaccgagggatgcctgccggccttccctccgcaggtctttacgctgccgcagtacggttacgcgacgctgaaccgcgacaacacagaaaatcccaccgagaggagcagcttcttctgcctagagtactttcccagcaagatgctgagaacgggcaacaactttgagtttacctacaactttgaggaggtgcccttccactccagcttcgctcccagtcagaacctcttcaagctggccaacccgctggtggaccagtacttgtaccgcttcgtgagcacaaataacactggcggagtccagttcaacaagaacctggccgggagatacgccaacacctacaaaaactggttcccggggcccatgggccgaacccagggctggaacctgggctccggggtcaaccgcgccagtgtcagcgccttcgccacgaccaataggatggagctcgagggcgcgagttaccaggtgcccccgcagccgaacggcatgaccaacaacctccagggcagcaacacctatgccctggagaacactatgatcttcaacagccagccggcgaacccgggcaccaccgccacgtacctcgagggcaacatgctcatcaccagcgagagcgagacgcagccggtgaaccgcgtggcgtacaacgtcggcgggcagatggccaccaacaaccagagctccaccactgcccccgcgaccggcacgtacaacctccaggaaatcgtgcccggcagcgtgtggatggagagggacgtgtacctccaaggacccatctgggccaagatcccagagacgggggcgcactttcacccctctccggccatgggcggattcggactcaaacacccaccgcccatgatgctcatcaagaacacgcctgtgcccggaaatatcaccagcttctcggacgtgcccgtcagcagcttcatcacccagtacagcaccgggcaggtcaccgtggagatggagtgggagctcaagaaggaaaactccaagaggtggaacccagagatccagtacacaaacaactacaacgacccccagtttgtggactttgccccggacagcaccggggaatacagaaccaccagacctatcggaacccgataccttacccgacccctttaa

SEQ ID NO: 22 - protein, 738 aa, Adeno-associated virus
MAADGYLPDWLEDNLSEGIREWWDLKPGAPKPKANQQKQDDGRGLVLPGYKYLGPFNGLDKGEPVNAADAAALEHDKAYDQQLKAGDNPYLRYNHADAEFQERLQEDTSFGGNLGRAVFQAKKRVLEPLGLVEEGAKTAPGKKRPVEPSPQRSPDSSTGIGKKGQQPAKKRLNFGQTGDSESVPDPQPIGEPPAGPSGLGSGTMAAGGGAPMADNNEGADGVGSSSGNWHCDSTWLGDRVITTSTRTWALPTYNNHLYKQISNGTSGGSTNDNTYFGYSTPWGYFDFNRFHCHFSPRDWQRLINNNWGFRPKRLNFKLFNIQVKEVTQNEGTKTIANNLTSTIQVFTDSEYQLPYVLGSAHQGCLPPFPADVFMIPQYGYLTLNNGSQAVGRSSFYCLEYFPSQMLRTGNNFEFSYQFEDVPFHSSYAHSQSLDRLMNPLIDQYLYYLSRTQSTGGTAGTQQLLFSQAGPNNMSAQAKNWLPGPCYRQQRVSTTLSQNNNSNFAWTGATKYHLNGRDSLVNPGVAMATHKDDEERFFPSSGVLMFGKQGAGKDNVDYSSVMLTSEEEIKTTNPVATEQYGVVADNLQQQNAAPIVGAVNSQGALPGMVWQNRDVYLQGPIWAKIPHTDGNFHPSPLMGGFGLKHPPPQILIKNTPVPADPPTTFSQAKLASFITQYSTGQVSVEIEWELQKENSKRWNPEIQYTSNYYKSTNVDFAVNTDGTYSEPRPIGTRYLTRNL

SEQ ID NO: 23 - DNA, 2217 bp, Adeno-associated virus
  source 1..2217: mol_type = genomic DNA
atggctgccgatggttatcttccagattggctcgaggacaacctctctgagggcattcgcgagtggtgggacttgaaacctggagccccgaaacccaaagccaaccagcaaaagcaggacgacggccggggtctggtgcttcctggctacaagtacctcggacccttcaacggactcgacaagggggagcccgtcaacgcggcggacgcagcggccctcgagcacgacaaggcctacgaccagcagctcaaagcgggtgacaatccgtacctgcggtataaccacgccgacgccgagtttcaggagcgtctgcaagaagatacgtcttttgggggcaacctcgggcgagcagtcttccaggccaagaagcgggttctcgaacctctcggtctggttgaggaaggcgctaagacggctcctggaaagaagagaccggtagagccatcaccccagcgttctccagactcctctacgggcatcggcaagaaaggccagcagcccgcgaaaaagagactcaactttgggcagactggcgactcagagtcagtgcccgaccctcaaccaatcggagaaccccccgcaggcccctctggtctgggatctggtacaatggctgcaggcggtggcgctccaatggcagacaataacgaaggcgccgacggagtgggtagttcctcaggaaattggcattgcgattccacatggctgggcgacagagtcatcaccaccagcacccgaacctgggccctccccacctacaacaaccacctctacaagcaaatctccaacgggacttcgggaggaagcaccaacgacaacacctacttcggctacagcaccccctgggggtattttgactttaacagattccactgccacttctcaccacgtgactggcagcgactcatcaacaacaactggggattccggcccaagagactcaacttcaagctcttcaacatccaggtcaaggaggtcacgcagaatgaaggcaccaagaccatcgccaataaccttaccagcacgattcaggtctttacggactcggaataccagctcccgtacgtcctcggctctgcgcaccagggctgcctgcctccgttcccggcggacgtcttcatgattcctcagtacgggtacctgactctgaacaatggcagtcaggccgtgggccgttcctccttctactgcctggagtactttccttctcaaatgctgagaacgggcaacaactttgagttcagctaccagtttgaggacgtgccttttcacagcagctacgcgcacagccaaagcctggaccggctgatgaaccccctcatcgaccagtacctgtactacctgtctcggactcagtccacgggaggtaccgcaggaactcagcagttgctattttctcaggccgggcctaataacatgtcggctcaggccaaaaactggctacccgggccctgctaccggcagcaacgcgtctccacgacactgtcgcaaaataacaacagcaactttgcctggaccggtgccaccaagtatcatctgaatggcagagactctctggtaaatcccggtgtcgctatggcaacccacaaggacgacgaagagcgattttttccgtccagcggagtcttaatgtttgggaaacagggagctggaaaagacaacgtggactatagcagcgttatgctaaccagtgaggaagaaattaaaaccaccaacccagtggccacagaacagtacggcgtggtggccgataacctgcaacagcaaaacgccgctcctattgtaggggccgtcaacagtcaaggagccttacctggcatggtctggcagaaccgggacgtgtacctgcagggtcctatctgggccaagattcctcacacggacggaaactttcatccctcgccgctgatgggaggctttggactgaaacacccgcctcctcagatcctgattaagaatacacctgttcccgcggatcctccaactaccttcagtcaagctaagctggcgtcgttcatcacgcagtacagcaccggacaggtcagcgtggaaattgaatgggagctgcagaaagaaaacagcaaacgctggaacccagagattcaatacacttccaactactacaaatctacaaatgtggactttgctgttaacacagatggcacttattctgagcctcgccccatcggcacccgttacctcacccgtaatctgtaa

SEQ ID NO: 24 - protein, 735 aa, Adeno-associated virus 2 [sequence omitted]

SEQ ID NO: 25 - DNA, 2208 bp, Adeno-associated virus 2
  source 1..2208: mol_type = genomic DNA
atggctgccgatggttatcttccagattggctcgaggacactctctctgaaggaataagacagtggtggaagctcaaacctggcccaccaccaccaaagcccgcagagcggcataaggacgacagcaggggtcttgtgcttcctgggtacaagtacctcggacccttcaacggactcgacaagggagagccggtcaacgaggcagacgccgcggccctcgagcacgacaaagcctacgaccggcagctcgacagcggagacaacccgtacctcaagtacaaccacgccgacgcggagtttcaggagcgccttaaagaagatacgtcttttgggggcaacctcggacgagcagtcttccaggcgaaaaagagggttcttgaacctctgggcctggttgaggaacctgttaagacggctccgggaaaaaagaggccggtagagcactctcctgtggagccagactcctcctcgggaaccggaaaggcgggccagcagcctgcaagaaaaagattgaattttggtcagactggagacgcagactcagtacctgacccccagcctctcggacagccaccagcagccccctctggtctgggaactaatacgatggctacaggcagtggcgcaccaatggcagacaataacgagggcgccgacggagtgggtaattcctcgggaaattggcattgcgattccacatggatgggcgacagagtcatcaccaccagcacccgaacctgggccctgcccacctacaacaaccacctctacaaacaaatttccagccaatcaggagcctcgaacgacaatcactactttggctacagcaccccttgggggtattttgacttcaacagattccactgccacttttcaccacgtgactggcaaagactcatcaacaacaactggggattccgacccaagagactcaacttcaagctctttaacattcaagtcaaagaggtcacgcagaatgacggtacgacgacgattgccaataaccttaccagcacggttcaggtgtttactgactcggagtaccagctcccgtacgtcctcggctcggcgcatcaaggatgcctcccgccgttcccagcagacgtcttcatggtgccacagtatggatacctcaccctgaacaacgggagtcaggcagtaggacgctcttcattttactgcctggagtactttccttctcagatgctgcgtaccggaaacaactttaccttcagctacacttttgaggacgttcctttccacagcagctacgctcacagccagagtctggaccgtctcatgaatcctctcatcgaccagtacctgtattacttgagcagaacaaacactccaagtggaaccaccacgcagtcaaggcttcagttttctcaggccggagcgagtgacattcgggaccagtctaggaactggcttcctggaccctgttaccgccagcagcgagtatcaaagacatctgcggataacaacaacagtgaatactcgtggactggagctaccaagtaccacctcaatggcagagactctctggtgaatccgggcccggccatggcaagccacaaggacgatgaagaaaagttttttcctcagagcggggttctcatctttgggaagcaaggctcagagaaaacaaatgtggacattgaaaaggtcatgattacagacgaagaggaaatcaggacaaccaatcccgtggctacggagcagtatggttctgtatctaccaacctccagagaggcaacagacaagcagctaccgcagatgtcaacacacaaggcgttcttccaggcatggtctggcaggacagagatgtgtaccttcaggggcccatctgggcaaagattccacacacggacggacattttcacccctctcccctcatgggtggattcggacttaaacaccctcctccacagattctcatcaagaacaccccggtacctgcgaatccttcgaccaccttcagtgcggcaaagtttgcttccttcatcacacagtactccacgggacaggtcagcgtggagatcgagtgggagctgcagaaggaaaacagcaaacgctggaatcccgaaattcagtacacttccaactacaacaagtctgttaatgtggactttactgtggacactaatggcgtgtattcagagcctcgccccattggcaccagatacctgactcgtaatctgtaa

SEQ ID NO: 26 - DNA, 45 bp, synthetic construct
  source 1..45: mol_type = other DNA
ggtggtggtggtagcggcggcggcggctctggtggtggtggatcc

SEQ ID NO: 27-39 - skipped (13 entries)

SEQ ID NO: 40 - protein, 19 aa, synthetic construct
PINGAVHLYAQAQTGWVEN

SEQ ID NO: 41 - protein, 19 aa, synthetic construct
PLNGAVHLNAQAQTGWVEN

SEQ ID NO: 42 - protein, 19 aa, synthetic construct
PLNGAVHLYAQAQSGWVEN

SEQ ID NO: 43 - protein, 19 aa, synthetic construct
PLNGAVHLYAQAQTAWVEN

SEQ ID NO: 44 - protein, 19 aa, synthetic construct
PLNGAVHLYAQAQTGCVEN

SEQ ID NO: 45 - protein, 19 aa, synthetic construct
PLNGAVHLYAQAQTGLVEN

SEQ ID NO: 46 - protein, 19 aa, synthetic construct
PVNGAVHLYAQAQTGWVEN

SEQ ID NO: 47 - protein, 19 aa, synthetic construct
SLNGAVHLYAQAQTGWVEN

SEQ ID NO: 48 - protein, 19 aa, synthetic construct
TLNGAVHLYAQAQTGWVEN

SEQ ID NO: 49 - protein, 19 aa, synthetic construct
PHNGAVHLYAQAQTGWVHN

SEQ ID NO: 50 - protein, 19 aa, synthetic construct
PINGAVHLYAQAQTGWVHN

SEQ ID NO: 51 - protein, 19 aa, synthetic construct
PLKGAVHLYAQAQTGWVHN

SEQ ID NO: 52 - protein, 19 aa, synthetic construct
PLNGAAHLYAQAQTGWVHN

SEQ ID NO: 53 - protein, 19 aa, synthetic construct
PLNGADHLYAQAQTGWVHN

SEQ ID NO: 54 - protein, 19 aa, synthetic construct
PLNGAGHLYAQAQTGWVHN

SEQ ID NO: 55 - protein, 19 aa, synthetic construct
PLNGALHLYAQAQTGWVHN

SEQ ID NO: 56 - protein, 19 aa, synthetic construct
PLNGAVDLYAQAQTGWVHN

SEQ ID NO: 57 - protein, 19 aa, synthetic construct
PLNGAVHHYAQAQTGWVHN

SEQ ID NO: 58 - protein, 19 aa, synthetic construct
PLNGAVHIYAQAQTGWVHN

SEQ ID NO: 59 - protein, 19 aa, synthetic construct
PLNGAVHLDAQAQTGWVHN

SEQ ID NO: 60 - protein, 19 aa, synthetic construct
PLNGAVHLNAQAQTGWVHN

SEQ ID NO: 61 - protein, 19 aa, synthetic construct
PLNGAVHLSAQAQTGWVHN

SEQ ID NO: 62 - protein, 19 aa, synthetic construct
PLNGAVHLYAKAQTGWVHN

SEQ ID NO: 63 - protein, 19 aa, synthetic construct
PLNGAVHLYAQAKTGWVHN

SEQ ID NO: 64 - protein, 19 aa, synthetic construct
PLNGAVHLYAQAQAGWVHN

SEQ ID NO: 65 - protein, 19 aa, synthetic construct
PLNGAVHLYAQAQRGWVHN

SEQ ID NO: 66 - protein, 19 aa, synthetic construct
PLNGAVHLYAQAQSGWVHN

SEQ ID NO: 67 - protein, 19 aa, synthetic construct
PLNGAVHLYAQAQTGCVHN

SEQ ID NO: 68 - protein, 19 aa, synthetic construct
PLNGAVHLYAQAQTGLVHN

SEQ ID NO: 69 - protein, 19 aa, synthetic construct
PLNGAVHLYAQAQVSAVHN

SEQ ID NO: 70 - protein, 19 aa, synthetic construct
PLNGAVHLYAQEQTGWVHN

SEQ ID NO: 71 - protein, 19 aa, synthetic construct
PLNGAVHLYAQGQTGWVHN

SEQ ID NO: 72 - protein, 19 aa, synthetic construct
PLNGAVHLYDQAQTGWVHN

SEQ ID NO: 73 - protein, 19 aa, synthetic construct
PLNGAVHLYGQAQTGWVHN

SEQ ID NO: 74 - protein, 19 aa, synthetic construct
PLNGAVHLYSQAQTGWVHN

SEQ ID NO: 75 - protein, 19 aa, synthetic construct
PLNGAVHRYAQAQTGWVHN

SEQ ID NO: 76 - protein, 19 aa, synthetic construct
PLNGAVHVYAQAQTGWVHN

SEQ ID NO: 77 - protein, 19 aa, synthetic construct
PLNGAVNLYAQAQTGWVHN

SEQ ID NO: 78 - protein, 19 aa, synthetic construct
PLNGAVPLYAQAQTGWVHN

SEQ ID NO: 79 - protein, 19 aa, synthetic construct
PLNGAVQLYAQAQTGWVHN

SEQ ID NO: 80 - protein, 19 aa, synthetic construct
PLNGTVHLYAQAQTGWVHN

SEQ ID NO: 81 - protein, 19 aa, synthetic construct
PRNGAVHLYAQAQTGWVHN

SEQ ID NO: 82 - protein, 19 aa, synthetic construct
PVNGAVHLYAQAQTGWVHN

SEQ ID NO: 83 - protein, 19 aa, synthetic construct
SLNGAVHLYAQAQTGWVHN

SEQ ID NO: 84 - protein, 19 aa, synthetic construct
TLNGAVHLYAQAQTGWVHN

SEQ ID NO: 85 - protein, 19 aa, synthetic construct
ALNGAVNLYAQAQTGWVKN

SEQ ID NO: 86 - protein, 19 aa, synthetic construct
KLNGAVHLYAQAQTGWVKN

SEQ ID NO: 87 - protein, 19 aa, synthetic construct
PHNGAVHLYAQAQTGWVKN

SEQ ID NO: 88 - protein, 19 aa, synthetic construct
PINGAVHLYAQAQTGWVKN

SEQ ID NO: 89 - protein, 19 aa, synthetic construct
PLKGAVHLYAQAQTGWVKN

SEQ ID NO: 90 - protein, 19 aa, synthetic construct
PLNAAVHLYAQAQTGWVKN

SEQ ID NO: 91 - protein, 19 aa, synthetic construct
PLNGAAHLYAQAQTGWVKN

SEQ ID NO: 92 - protein, 19 aa, synthetic construct
PLNGADHLYAQAQTGWVKN

SEQ ID NO: 93 - protein, 19 aa, synthetic construct
PLNGAGHLYAQAQTGWVKN

SEQ ID NO: 94 - protein, 19 aa, synthetic construct
PLNGAVDLYAQAQTGWVKN

SEQ ID NO: 95 - protein, 19 aa, synthetic construct
PLNGAVHHYAQAQTGWVKN

SEQ ID NO: 96 - protein, 19 aa, synthetic construct
PLNGAVHIYAQAQTGWVKN

SEQ ID NO: 97 - protein, 19 aa, synthetic construct
PLNGAVHLDAQAQTGWVKN

SEQ ID NO: 98 - protein, 19 aa, synthetic construct
PLNGAVHLNAQAQTGWVKN

SEQ ID NO: 99 - protein, 19 aa, synthetic construct
PLNGAVHLSAQAQTGWVKN

SEQ ID NO: 100 - protein, 19 aa, synthetic construct
PLNGAVHLYAEAQTGWVKN

SEQ ID NO: 101 - protein, 19 aa, synthetic construct
PLNGAVHLYAHAQTGWVKN

SEQ ID NO: 102 - protein, 19 aa, synthetic construct
PLNGAVHLYALAQTGWVKN

SEQ ID NO: 103 - protein, 19 aa, synthetic construct
PLNGAVHLYAPAQTGWVKN

SEQ ID NO: 104 - protein, 19 aa, synthetic construct
PLNGAVHLYAQAETGWVKN

SEQ ID NO: 105 - protein, 19 aa, synthetic construct
PLNGAVHLYAQAQKGWVKN

SEQ ID NO: 106 - protein, 19 aa, synthetic construct
PLNGAVHLYAQAQPGWVKN

SEQ ID NO: 107 - protein, 19 aa, synthetic construct
PLNGAVHLYAQAQSGWVKN

SEQ ID NO: 108 - protein, 19 aa, synthetic construct
PLNGAVHLYAQAQSSLVKN

SEQ ID NO: 109 - protein, 19 aa, synthetic construct
PLNGAVHLYAQAQSSSVKN

SEQ ID NO: 110 - protein, 19 aa, synthetic construct
PLNGAVHLYAQAQTACVKN

SEQ ID NO: 111 - protein, 19 aa, synthetic construct
PLNGAVHLYAQAQTEWVKN

SEQ ID NO: 112 - protein, 19 aa, synthetic construct
PLNGAVHLYAQAQTGAVKN

SEQ ID NO: 113 - protein, 19 aa, synthetic construct
PLNGAVHLYAQAQTGCVKN

SEQ ID NO: 114 - protein, 19 aa, synthetic construct
PLNGAVHLYAQAQTGLVKN

SEQ ID NO: 115 - protein, 19 aa, synthetic construct
PLNGAVHLYAQAQTSWVKN

SEQ ID NO: 116 - protein, 19 aa, synthetic construct
PLNGAVHLYAQEQTGWVKN

SEQ ID NO: 117 - protein, 19 aa, synthetic construct
PLNGAVHLYAQSQTGWVKN

SEQ ID NO: 118 - protein, 19 aa, synthetic construct
PLNGAVHLYDQAQTGWVKN

SEQ ID NO: 119 - protein, 19 aa, synthetic construct
PLNGAVHLYEQAQTGWVKN

SEQ ID NO: 120 - protein, 19 aa, synthetic construct
PLNGAVHLYGQAQTGWVKN

SEQ ID NO: 121 - protein, 19 aa, synthetic construct
PLNGAVHLYSQAQTGLVKN

SEQ ID NO: 122 - protein, 19 aa, synthetic construct
PLNGAVHLYSQAQTGWVKN

SEQ ID NO: 123 - protein, 19 aa, synthetic construct
PLNGAVHLYTQAQTGWVKN

SEQ ID NO: 124 - protein, 19 aa, synthetic construct
PLNGAVHPYAQAQTGWVKN

SEQ ID NO: 125 - protein, 19 aa, synthetic construct
PLNGAVHRSLQAQTGWVKN

SEQ ID NO: 126 - protein, 19 aa, synthetic construct
PLNGAVHRYAQAQTGWVKN

SEQ ID NO: 127 - protein, 19 aa, synthetic construct
PLNGAVHVYAQAQTGWVKN

SEQ ID NO: 128 - protein, 19 aa, synthetic construct
PLNGAVLLYAQAQTGWVKN

SEQ ID NO: 129 - protein, 19 aa, synthetic construct
PLNGAVNLYAQAQTGCVKN

SEQ ID NO: 130 - protein, 19 aa, synthetic construct
PLNGAVNLYAQAQTGWVKN

SEQ ID NO: 131 - protein, 19 aa, synthetic construct
PLNGAVNLYDQAQTGWVKN

SEQ ID NO: 132 - protein, 19 aa, synthetic construct
PLNGAVPLYAQAQTGWVKN

SEQ ID NO: 133 - protein, 19 aa, synthetic construct
PLNGAVQLYAQAQTGWVKN

SEQ ID NO: 134 - protein, 19 aa, synthetic construct
PLNGAVRSTAQAQTGWVKN

SEQ ID NO: 135 - protein, 19 aa, synthetic construct
PLNGAVSLRAQAQTGWVKN

SEQ ID NO: 136 - protein, 19 aa, synthetic construct
PLNGAVSSRAQAQTGWVKN

SEQ ID NO: 137 - DNA, 2211 bp, Adeno-associated virus
  source 1..2211: mol_type = genomic DNA
atggctgccgatggttatcttccagattggctcgaggacaaccttagtgaaggaattcgcgagtggtgggctttgaaacctggagcccctcaacccaaggcaaatcaacaacatcaagacaacgctcgaggtcttgtgcttccgggttacaaataccttggacccggcaacggactcgacaagggggagccggtcaacgcagcagacgcggcggccctcgagcacgacaaggcctacgaccagcagctcaaggccggagacaacccgtacctcaagtacaaccacgccgacgccgagttccaggagcggctcaaagaagatacgtcttttgggggcaacctcgggcgagcagtcttccaggccaaaaagaggcttcttgaacctcttggtctggttgaggaagcggctaagacggctcctggaaagaagaggcctgtagagcagtctcctcaggaaccggactcctccgcgggtattggcaaatcgggtgcacagcccgctaaaaagagactcaatttcggtcagactggcgacacagagtcagtcccagaccctcaaccaatcggagaacctcccgcagccccctcaggtgtgggatctcttacaatggcttcaggtggtggcgcaccagtggcagacaataacgaaggtgccgatggagtgggtagttcctcgggaaattggcattgcgattcccaatggctgggggacagagtcatcaccaccagcacccgaacctgggccctgcccacctacaacaatcacctctacaagcaaatctccaacagcacatctggaggatcttcaaatgacaacgcctacttcggctacagcaccccctgggggtattttgacttcaacagattccactgccacttctcaccacgtgactggcagcgactcatcaacaacaactggggattccggcctaagcgactcaacttcaagctcttcaacattcaggtcaaagaggttacggacaacaatggagtcaagaccatcgccaataaccttaccagcacggtccaggtcttcacggactcagactatcagctcccgtacgtgctcgggtcggctcacgagggctgcctcccgccgttcccagcggacgttttcatgattcctcagtacgggtatctgacgcttaatgatggaagccaggccgtgggtcgttcgtccttttactgcctggaatatttcccgtcgcaaatgctaagaacgggtaacaacttccagttcagctacgagtttgagaacgtacctttccatagcagctacgctcacagccaaagcctggaccgactaatgaatccactcatcgaccaatacttgtactatctctcaaagactattaacggttctggacagaatcaacaaacgctaaaattcagtgtggccggacccagcaacatggctgtccagggaagaaactacatacctggacccagctaccgacaacaacgtgtctcaaccactgtgactcaaaacaacaacagcgaatttgcttggcctggagcttcttcttgggctctcaatggacgtaatagcttgatgaatcctggacctgctatggccagccacaaagaaggagaggaccgtttctttcctttgtctggatctttaatttttggcaaacaaggaactggaagagacaacgtggatgcggacaaagtcatgataaccaacgaagaagaaattaaaactactaacccggtagcaacggagtcctatggacaagtggccacaaaccaccagagtgcccaagcacaggcgcagaccggctgggttcaaaaccaaggaatacttccgggtatggtttggcaggacagagatgtgtacctgcaaggacccatttgggccaaaattcctcacacggacggcaactttcacccttctccgctgatgggagggtttggaatgaagcacccgcctcctcagatcctcatcaaaaacacacctgtacctgcggatcctccaacggccttcaacaaggacaagctgaactctttcatcacccagtattctactggccaagtcagcgtggagatcgagtgggagctgcagaaggaaaacagcaagcgctggaacccggagatccagtacacttccaactattacaagtctaataatgttgaatttgctgttaatactgaaggtgtatatagtgaaccccgccccattggcaccagatacctgactcgtaatctgtaa

SEQ ID NO: 138 - protein, 736 aa, Adeno-associated virus
MAADGYLPDWLEDNLSEGIREWWALKPGAPQPKANQQHQDNARGLVLPGYKYLGPGNGLDKGEPVNAADAAALEHDKAYDQQLKAGDNPYLKYNHADAEFQERLKEDTSFGGNLGRAVFQAKKRLLEPLGLVEEAAKTAPGKKRPVEQSPQEPDSSAGIGKSGAQPAKKRLNFGQTGDTESVPDPQPIGEPPAAPSGVGSLTMASGGGAPVADNNEGADGVGSSSGNWHCDSQWLGDRVITTSTRTWALPTYNNHLYKQISNSTSGGSSNDNAYFGYSTPWGYFDFNRFHCHFSPRDWQRLINNNWGFRPKRLNFKLFNIQVKEVTDNNGVKTIANNLTSTVQVFTDSDYQLPYVLGSAHEGCLPPFPADVFMIPQYGYLTLNDGSQAVGRSSFYCLEYFPSQMLRTGNNFQFSYEFENVPFHSSYAHSQSLDRLMNPLIDQYLYYLSKTINGSGQNQQTLKFSVAGPSNMAVQGRNYIPGPSYRQQRVSTTVTQNNNSEFAWPGASSWALNGRNSLMNPGPAMASHKEGEDRFFPLSGSLIFGKQGTGRDNVDADKVMITNEEEIKTTNPVATESYGQVATNHQSAQAQAQTGWVQNQGILPGMVWQDRDVYLQGPIWAKIPHTDGNFHPSPLMGGFGMKHPPPQILIKNTPVPADPPTAFNKDKLNSFITQYSTGQVSVEIEWELQKENSKRWNPEIQYTSNYYKSNNVEFAVNTEGVYSEPRPIGTRYLTRNL

SEQ ID NO: 139 - protein, 19 aa, synthetic construct
QLNGAVHLYAQAQLSPVQN

SEQ ID NO: 140 - protein, 19 aa, synthetic construct
PLDGAVHLYAQPQTGWVQN

SEQ ID NO: 141 - protein, 19 aa, synthetic construct
QLNGAVHLYAQAQTMSVQN

SEQ ID NO: 142 - protein, 19 aa, synthetic construct
PLDSSVHLYAQAQTGWVQN

SEQ ID NO: 143 - protein, 19 aa, synthetic construct
PLNGAVHLYAQAQTTKVQN

SEQ ID NO: 144 - protein, 19 aa, synthetic construct
PLDGAVHLYAQAQTGSVQN

SEQ ID NO: 145 - protein, 19 aa, synthetic construct
ALNGAVHLYAQAQTTSVQN

SEQ ID NO: 146 - protein, 19 aa, synthetic construct
PLNGSVHLYAQAQTMSVQN

SEQ ID NO: 147 - protein, 19 aa, synthetic construct
QLNGAVHLYAQAQTSPVQN

SEQ ID NO: 148 - protein, 19 aa, synthetic construct
PLNGAVHLYAQAQTMKVQN

SEQ ID NO: 149 - protein, 19 aa, synthetic construct
PLNGAVHLYAQAQVAQVQN

SEQ ID NO: 150 - protein, 19 aa, synthetic construct
PLDGAVHLYAQAQTGGVQN

SEQ ID NO: 151 - protein, 19 aa, synthetic construct
PLNGAVHLYAQAQTAWDQN

SEQ ID NO: 152 - protein, 19 aa, synthetic construct
PLNGSVHLYAQAQTGWDQN

SEQ ID NO: 153 - protein, 19 aa, synthetic construct
PLNGAVHLYAQAQTGSVQH

SEQ ID NO: 154 - protein, 19 aa, synthetic construct
PLNGAVHLYAQAQVKQVQN

SEQ ID NO: 155 - protein, 19 aa, synthetic construct
PLNGAVHLYAQAQSAPVQN

SEQ ID NO: 156 - protein, 19 aa, synthetic construct
PLNGAVHLYAQAQLSKVQN

SEQ ID NO: 157 - protein, 19 aa, synthetic construct
PLNGAVHLYAQAQLAPVQN

SEQ ID NO: 158 - protein, 19 aa, synthetic construct
PLNGAVHLYAQAQLAQVQN

SEQ ID NO: 159 - protein, 19 aa, synthetic construct
QLNGAVHLYAQAQVASVQN

SEQ ID NO: 160 - protein, 19 aa, synthetic construct
PLNGAVHLYAQAQTAKVQN

SEQ ID NO: 161 - protein, 19 aa, synthetic construct
PLNGAVHLYAQAQSAKVQN

SEQ ID NO: 162 - protein, 19 aa, synthetic construct
PLNGAVHLYAQAQTGCFQN

SEQ ID NO: 163 - protein, 19 aa, synthetic construct
PLNGAVHLYAQAQTQKVQN

SEQ ID NO: 164 - protein, 19 aa, synthetic construct
PLNGSVHLYAQAQTTSVQN

SEQ ID NO: 165 - protein, 19 aa, synthetic construct
PLNGGVHLYAQAQTGRVQN

SEQ ID NO: 166 - protein, 19 aa, synthetic construct
PLNGAVHLYAQAQTVAVQN

SEQ ID NO: 167 - protein, 19 aa, synthetic construct
ALNGAVHLYAQAQSSPVQN

SEQ ID NO: 168 - protein, 19 aa, synthetic construct
PLNGAVHLYAQAQLSPVQN

SEQ ID NO: 169 - protein, 19 aa, synthetic construct
QLNGAVHLYAQAQTTSVQN

SEQ ID NO: 170 - protein, 19 aa, synthetic construct
PLNGAVHLYAQAQTTQVQN

SEQ ID NO: 171 - protein, 19 aa, synthetic construct
PLNGAVHLYAQAQTAQVQN

SEQ ID NO: 172 - protein, 19 aa, synthetic construct
QLNGAVHLYAQAQTVAVQN

SEQ ID NO: 173 - protein, 19 aa, synthetic construct
PLNGAVHLYAQAQRIAVQN

SEQ ID NO: 174 - protein, 19 aa, synthetic construct
PLNGAVHLYAQAQRASVQN

SEQ ID NO: 175 - protein, 19 aa, synthetic construct
PLNGAVHLYAQAQTTPVQN

SEQ ID NO: 176 - protein, 19 aa, synthetic construct
QLNGAVHLYAQAQLASVQN

SEQ ID NO: 177 - protein, 19 aa, synthetic construct
PLNGAVHLYAQAQLTPVQN

SEQ ID NO: 178 - protein, 19 aa, synthetic construct
PLNGAVHLYAQAQSTPVQN

SEQ ID NO: 179 - protein, 19 aa, synthetic construct
PLNGAVHLYAQAQTSPVQN

SEQ ID NO: 180 - protein, 19 aa, synthetic construct
QLNGAVHLYAQAQVSQVQN

SEQ ID NO: 181 - protein, 19 aa, synthetic construct
PLNGAVHLYAQAQTMQVQN

SEQ ID NO: 182 - protein, 19 aa, synthetic construct
PLNGAVHLYAQAQTSKVQN

SEQ ID NO: 183 - protein, 19 aa, synthetic construct
SLNGAVHLYAQAQVSPVQN

SEQ ID NO: 184 - protein, 19 aa, synthetic construct
PLNGAVHLYAQAQVSQVQN

SEQ ID NO: 185 - protein, 19 aa, synthetic construct
PLNGAVHLYAQAQVSPVQN

SEQ ID NO: 186 - protein, 19 aa, synthetic construct
PLNGAVHLYAQAQTVQVQN

SEQ ID NO: 187 - protein, 19 aa, synthetic construct
PLNGAVHLYAQAQVTAVQN

SEQ ID NO: 188 - protein, 19 aa, synthetic construct
PLNGAVHLYAQAQRQPVQN

SEQ ID NO: 189 - protein, 19 aa, synthetic construct
PLNGNVHLYAQAQTGGVQN

SEQ ID NO: 190 - protein, 19 aa, synthetic construct
PLDGAVHLYAQAQTAWVQN

SEQ ID NO: 191 - protein, 19 aa, synthetic construct
PLNGAVHLYAQAQISGVQN

SEQ ID NO: 192 - protein, 19 aa, synthetic construct
PLNGAVHLYAQAQVRPVQN

SEQ ID NO: 193 - protein, 19 aa, synthetic construct
PLNGAVHLYAQAQLGPVQN

SEQ ID NO: 194 - protein, 19 aa, synthetic construct
PLNGAVHLYAQAQTNQVQN

SEQ ID NO: 195 - protein, 19 aa, synthetic construct
PLNGAVHLYAQAQVQQVQN

SEQ ID NO: 196 - protein, 19 aa, synthetic construct
PLNGAVHLYAQAQVANVQN

SEQ ID NO: 197 - protein, 19 aa, synthetic construct
PLNGAVHLYAQAQAAPVQN

SEQ ID NO: 198 - protein, 19 aa, synthetic construct
QLNGAVHLYAQAQVAQVQN

SEQ ID NO: 199 - protein, 19 aa, synthetic construct
PLNGAVHLYAQAQRSTVQN

SEQ ID NO: 200 - protein, 19 aa, synthetic construct
PLNGAVHLYAQAQTMAVQN

SEQ ID NO: 201 - protein, 19 aa, synthetic construct
PLNGAVHLYAQAQIQPVQN

SEQ ID NO: 202 - protein, 19 aa, synthetic construct
PLNGAVHLYAQAQIASVQN

SEQ ID NO: 203 - protein, 19 aa, synthetic construct
PLNGAVHLYAQAQTVSVQN

SEQ ID NO: 204 - protein, 19 aa, synthetic construct
PLNGAVHLYAQAQRGSVQN

SEQ ID NO: 205 - protein, 19 aa, synthetic construct
PLNGAVHLYAQAQNSPVQN

SEQ ID NO: 206 - protein, 19 aa, synthetic construct
PLNGAVHLYAQAQLQPVQN

SEQ ID NO: 207 - protein, 19 aa, synthetic construct
PLNGAVHLYAQAQVTGVQN

SEQ ID NO: 208 - protein, 19 aa, synthetic construct
PLNGAVHLYAQAQVMQVQN

SEQ ID NO: 209 - protein, 19 aa, synthetic construct
PLNGAVHLYAQAQSMAVQN

SEQ ID NO: 210 - protein, 19 aa, synthetic construct
PLNGAVHLYAQAQVGKVQN

SEQ ID NO: 211 - protein, 19 aa, synthetic construct
ALNGAVHLYAQAQSAPVQN

SEQ ID NO: 212 - protein, 19 aa, synthetic construct
PLNGAVHLYAQAQIQSVQN

SEQ ID NO: 213 - protein, 19 aa, synthetic construct
PLNGAVHLYAQAQCSPVQN

SEQ ID NO: 214 - protein, 19 aa, synthetic construct
PLNGAVHLYAQAQLQRVQN

SEQ ID NO: 215 - protein, 19 aa, synthetic construct
PLNGAVHLYAQAQTAWVQH

SEQ ID NO: 216 - protein, 19 aa, synthetic construct
PLDGAVHLYAQAQTGWDQN

SEQ ID NO: 217 - protein, 19 aa, synthetic construct
PLNGAVHLYAQAQTPPVQN

SEQ ID NO: 218 - protein, 19 aa, synthetic construct
PLNGAVHLYAQAQVTKVQN

SEQ ID NO: 219 - protein, 19 aa, synthetic construct
PLNGAVHLYAQAQSSPVQN

SEQ ID NO: 220 - protein, 19 aa, synthetic construct
PLNGAVHLYAQAQAGPVQN

SEQ ID NO: 221 - protein, 19 aa, synthetic construct
PLNGAVHLYAQAQLARVQN

SEQ ID NO: 222 - protein, 19 aa, synthetic construct
PLNGAVHLYAQAQTTTVQN

SEQ ID NO: 223 - protein, 19 aa, synthetic construct
PLNGAVHLYAQAQTGGFQN

SEQ ID NO: 224 - protein, 19 aa, synthetic construct
PLNGAVHLYAQAQTLQVQN

SEQ ID NO: 225 - protein, 19 aa, synthetic construct
PLNGAVHLYAQAQTMSVQN

SEQ ID NO: 226 - protein, 19 aa, synthetic construct
QLNGAVHLYAQAQLQPVQN

SEQ ID NO: 227 - protein, 19 aa, synthetic construct
PLNGAVHLYAQAQVAKVQN

SEQ ID NO: 228 - protein, 19 aa, synthetic construct
PLNGAVHLYAQAQRAAVQN

SEQ ID NO: 229 - protein, 19 aa, synthetic construct
PLNGAVHLYAQAQTVGVQN

SEQ ID NO: 230 - protein, 19 aa, synthetic construct
PLNGAVHLYAQAQLNPVQN

SEQ ID NO: 231 - protein, 19 aa, synthetic construct
PLNGAVHLYAQAQLSQVQN

SEQ ID NO: 232 - protein, 19 aa, synthetic construct
PLNGTVHLYAQAQTGSVQN

SEQ ID NO: 233 - protein, 19 aa, synthetic construct
PLNGAVHLYAQAQTKPVQN

SEQ ID NO: 234 - protein, 19 aa, synthetic construct
PLNGAVHLYAQAQTNAVQN

SEQ ID NO: 235 - protein, 19 aa, synthetic construct
ALDGAVHLYAQAQTGWVQN

SEQ ID NO: 236 - protein, 19 aa, synthetic construct
PLNGAVHLYAQAQLATVQN

SEQ ID NO: 237 - protein, 19 aa, synthetic construct
PLNGAVHLYAQAQVTPVQN

SEQ ID NO: 238 - protein, 19 aa, synthetic construct
PLNGAVHLYAQAQVQAVQN

SEQ ID NO: 239 - protein, 19 aa, synthetic construct
PLNGAVHLYAQAQTTSVQN

SEQ ID NO: 240 - protein, 19 aa, synthetic construct
PLNGAVHLYAQAQCTPVQN

SEQ ID NO: 241 - protein, 19 aa, synthetic construct
ALNGAVHLYAQAQTGRVQN

SEQ ID NO: 242 - protein, 19 aa, synthetic construct
PLNGSVHLYAQAQTGWVQD

SEQ ID NO: 243 - protein, 19 aa, synthetic construct
PLNGAVHLYAQAQTAGVQN

SEQ ID NO: 244 - protein, 19 aa, synthetic construct
PLNGAVHLYAQAQTSQVQN

SEQ ID NO: 245 - protein, 19 aa, synthetic construct
PLNGAVHLYAQAQTMNVQN

SEQ ID NO: 246 - protein, 19 aa, synthetic construct
PLNGAVHLYAQAQTSTVQN

SEQ ID NO: 247 - protein, 19 aa, synthetic construct
PLNGAVHLYAQAQVKPVQN

SEQ ID NO: 248 - protein, 19 aa, synthetic construct
PLNGAVHLYAQAQASPVQN

SEQ ID NO: 249 - protein, 19 aa, synthetic construct
PLNGAVHLYAQAQVAAVQN

SEQ ID NO: 250 - protein, 19 aa, synthetic construct
PLNGAVHLYAQAQLKSVQN

SEQ ID NO: 251 - protein, 19 aa, synthetic construct
PLNGAVHLYAQAQIAAVQN

SEQ ID NO: 252 - protein, 19 aa, synthetic construct
PLNGAVHLYAQAQTAAVQN

SEQ ID NO: 253 - protein, 19 aa, synthetic construct
PLNGAVHLYAQAQTKAVQN

SEQ ID NO: 254 - protein, 19 aa, synthetic construct
PLNGAVHLYAQAQTGSVQS

SEQ ID NO: 255 - protein, 19 aa, synthetic construct
PLNGAVHLYAQAQVSNVQN

SEQ ID NO: 256 - protein, 19 aa, synthetic construct
PLNGAVHLYAQAQTAPVQN

SEQ ID NO: 257 - protein, 19 aa, synthetic construct
PLNGAVHLYAQAQLMPVQN

SEQ ID NO: 258 - protein, 19 aa, synthetic construct
PLNGAVHLYAQAQLHPVQN

SEQ ID NO: 259 - protein, 19 aa, synthetic construct
PLNGAVHLYAQAQRAQVQN

SEQ ID NO: 260 - protein, 19 aa, synthetic construct
PLNGAVHLYAQAQLTNVQN

SEQ ID NO: 261 - protein, 19 aa, synthetic construct
PLNGAVHLYAQAQRTTVQN

SEQ ID NO: 262 - protein, 19 aa, synthetic construct
PLNGAVHLYAQAQTSVVQN

SEQ ID NO: 263 - protein, 19 aa, synthetic construct
SLNGAVHLYAQAQTMSVQN

SEQ ID NO: 264 - protein, 19 aa, synthetic construct
ALNGAVHLYAQAQTLAVQN

SEQ ID NO: 265 - protein, 19 aa, synthetic construct
PLNGAVHLYAQAQRMSVQN

SEQ ID NO: 266 - protein, 19 aa, synthetic construct
ALNGAVHLYAQAQLTPVQN

SEQ ID NO: 267 - protein, 19 aa, synthetic construct
PLNGAVHLYAQAQVGNVQN

SEQ ID NO: 268 - protein, 19 aa, synthetic construct
PLNGAVHLYAQAQLMQVQN

SEQ ID NO: 269 - protein, 19 aa, synthetic construct
PLNGSVHLYAQAQTAQVQN

SEQ ID NO: 270 - protein, 19 aa, synthetic construct
PLNGAVHLYAQAQTATVQN

SEQ ID NO: 271 - protein, 19 aa, synthetic construct
PLNGAVHLYAQAQVHPVQN

SEQ ID NO: 272 - protein, 19 aa, synthetic construct
PLNGAVHLYAQAQVSPVQT

SEQ ID NO: 273 - protein, 19 aa, synthetic construct
PLNGAVHLYAQAQISSVQN

SEQ ID NO: 274 - protein, 19 aa, synthetic construct
PLNGAVHLYAQAQVASVQN

SEQ ID NO: 275 - protein, 19 aa, synthetic construct
PLNGAVHLYAQAQTRWDQN

SEQ ID NO: 276 - protein, 19 aa, synthetic construct
PLNGAVHLYAQAQTMTVQN

SEQ ID NO: 277 - protein, 19 aa, synthetic construct
PLNGAVHLYAQAQRSSVQN

SEQ ID NO: 278 - protein, 19 aa, synthetic construct
PLNGGVHLYAQAQTGWVRN

SEQ ID NO: 279 - protein, 19 aa, synthetic construct
PLNGAVHLYAQAQTAWVQN

SEQ ID NO: 280 - protein, 19 aa, synthetic construct
PLNGSVHLYAQAQPGWVQN

SEQ ID NO: 281 - protein, 19 aa, synthetic construct
ALNGAVHLYAQAQTGWAQN

SEQ ID NO: 282 - protein, 19 aa, synthetic construct
PLNGAVHLYAQAQRTGVQN

SEQ ID NO: 283 - protein, 19 aa, synthetic construct
ALNGAVHLYAQAQTGWVQS

SEQ ID NO: 284 - protein, 19 aa, synthetic construct
PLNGAVHLYAQAQVATVQN

SEQ ID NO: 285 - protein, 19 aa, synthetic construct
PLNGAVHLYAQAQVTSVQN

SEQ ID NO: 286 - protein, 19 aa, synthetic construct
PLNGAVHLYAQAQVSSVQN

SEQ ID NO: 287 - protein, 19 aa, synthetic construct
PLNGSVHLYAQAQTSSVQN

SEQ ID NO: 288 - protein, 19 aa, synthetic construct
PLNGAVHLYAQAQTNSVQN

SEQ ID NO: 289 - protein, 19 aa, synthetic construct
PLNGAVHLYAQAQVKAVQN

SEQ ID NO: 290 - protein, 19 aa, synthetic construct
PLNGAVHLYAQAQSGPVQN

SEQ ID NO: 291 - protein, 19 aa, synthetic construct
PLNGAVHLYAQAQTGPVQN

SEQ ID NO: 292 - protein, 19 aa, synthetic construct
PLNGAVHLYAQAQTAMVQN

SEQ ID NO: 293 - protein, 19 aa, synthetic construct
PLNGAVHLYAQAQTQPVQN

SEQ ID NO: 294 - protein, 19 aa, synthetic construct
PLNGSVHLYAQAQTGSVQN

SEQ ID NO: 295 - protein, 19 aa, synthetic construct
PLNGAVHLYAQAQTQQVQN

SEQ ID NO: 296 - protein, 19 aa, synthetic construct
PLNGAVHLYAQAQVSRVQN

SEQ ID NO: 297 - protein, 19 aa, synthetic construct
QLNGAVHLYAQAQVLPVQN

SEQ ID NO: 298 - protein, 19 aa, synthetic construct
PLNGAVHLYAQAQTGWVQP

SEQ ID NO: 299 - protein, 19 aa, synthetic construct
QLNGAVHLYAQAQLGSVQN

SEQ ID NO: 300 - protein, 19 aa, synthetic construct
PLNGAVHLYAQAQVSAVQN

SEQ ID NO: 301 - protein, 19 aa, synthetic construct
PLNGAVHLYAQAQVLSVQN

SEQ ID NO: 302 - protein, 19 aa, synthetic construct
PLNGAVHLYAQAQTQHVQN

SEQ ID NO: 303 - protein, 19 aa, synthetic construct
PLNGAVHLYAQAQLASVQN

SEQ ID NO: 304 - protein, 19 aa, synthetic construct
PLNGAVHLYAQAQQAPVQN

SEQ ID NO: 305 - protein, 19 aa, synthetic construct
PLNGAVHLYAQAQNAQVQN

SEQ ID NO: 306 - protein, 19 aa, synthetic construct
PLNGAVHLYAQAQATPVQN

SEQ ID NO: 307 - protein, 19 aa, synthetic construct
PLNGAVHLYAQAQVQPVQN

SEQ ID NO: 308 - protein, 19 aa, synthetic construct
PLNGAVHLYAQAQTTAVQN

SEQ ID NO: 309 - protein, 19 aa, synthetic construct
PLNGAVHLYAQAQTGWVRN

SEQ ID NO: 310 - protein, 19 aa, synthetic construct
PLNGAVHLYAQAQLAAVQN

SEQ ID NO: 311 - protein, 19 aa, synthetic construct
PLNGAVHLYAQAQTSPDQN

SEQ ID NO: 312 - protein, 19 aa, synthetic construct
PLNGAVHLYAQAQRSGVQN

SEQ ID NO: 313 - protein, 19 aa, synthetic construct
PLNGAVHLYAQAQTGGVQT

SEQ ID NO: 314 - protein, 19 aa, synthetic construct
PLNGAVHLYAQAQTGWVPN

SEQ ID NO: 315 - protein, 19 aa, synthetic construct
PLDSAVHLYAQAQTGWVQN

SEQ ID NO: 316 - protein, 19 aa, synthetic construct
PLNGAVHLYAQAQTTPVQT

SEQ ID NO: 317 - protein, 19 aa, synthetic construct
PLNGAVHLYAQAQLMAVQN

SEQ ID NO: 318 - protein, 19 aa, synthetic construct
PLNGAVHLYAQAQTMPVQN

SEQ ID NO: 319 - protein, 19 aa, synthetic construct
PLNGAVHHYAQAQTSPVQN

SEQ ID NO: 320 - protein, 19 aa, synthetic construct
PLNGAVHLYAQAQLANVQN

SEQ ID NO: 321 - protein, 19 aa, synthetic construct
PLNGAVHLYAQAQVSTVQN

SEQ ID NO: 322 - protein, 19 aa, synthetic construct
PLNGAVHLYAQAQSAQVQN

SEQ ID NO: 323 - protein, 19 aa, synthetic construct
PLNGAVHLYAQAQNTPVQN

SEQ ID NO: 324 - protein, 19 aa, synthetic construct
PLNGAVHLYAQAQVSSVQT

SEQ ID NO: 325 - protein, 19 aa, synthetic construct
PLNGAVHLYAQAQTVSVKN

SEQ ID NO: 326 - protein, 19 aa, synthetic construct
PLNGAVHLYAQPQTGLVQN

SEQ ID NO: 327 - protein, 19 aa, synthetic construct
PLNGAVHLYAQAQTGSVQN

SEQ ID NO: 328 - protein, 19 aa, synthetic construct
SLNGAVHLYAQAQTLPVQN

SEQ ID NO: 329 - protein, 19 aa, synthetic construct
PLNGAVHLYAQAQTGGAQN

SEQ ID NO: 330 - protein, 19 aa, synthetic construct
SLNGAVHLYAQAQTAQVQN

SEQ ID NO: 331 - protein, 19 aa, synthetic construct
PLNGAVHLYAQAQTAVVQN

SEQ ID NO: 332 - protein, 19 aa, synthetic construct
PLNGAVHLYAQAQRLGVQN

SEQ ID NO: 333 - protein, 19 aa, synthetic construct
PLNGSVHLYAQAQTGWVQH

SEQ ID NO: 334 - protein, 19 aa, synthetic construct
PLNGAVHLYAQAQRTLVQN

SEQ ID NO: 335 - protein, 19 aa, synthetic construct
SLNGAVHLYAQAQTMAVQN

SEQ ID NO: 336 - protein, 19 aa, synthetic construct
PLNGAVHLYAQAQTQMVQN

SEQ ID NO: 337 - protein, 19 aa, synthetic construct
PLNGAVHLYAQAQITPVQN

SEQ ID NO: 338 - protein, 19 aa, synthetic construct
PLNGAVHLYAQAQTVWVQK

SEQ ID NO: 339 - protein, 19 aa, synthetic construct
PLNGAVHLYAQAQRSAVQN

SEQ ID NO: 340 - protein, 19 aa, synthetic construct
PLNGAVHLYAQAQTASVQN

SEQ ID NO: 341 - protein, 19 aa, synthetic construct
PLNGAVHLYAQAQTMGVQN

SEQ ID NO: 342 - protein, 19 aa, synthetic construct
PLNGAVHLYAQAQTGGVQH

SEQ ID NO: 343 - protein, 19 aa, synthetic construct
PLNGAVHLYAQAQVQSVQN

SEQ ID NO: 344 - protein, 19 aa, synthetic construct
PLNGAVHLYAQAQTGGVQN

SEQ ID NO: 345 - protein, 19 aa, synthetic construct
SLNGAVHLYAQAQTAPVQN

SEQ ID NO: 346 - protein, 19 aa, synthetic construct
PLNGAVHLYAQAQISPVQN

SEQ ID NO: 347 - protein, 19 aa, synthetic construct
PLNGAVHLYAQPQTGWVKN

SEQ ID NO: 348 - protein, 19 aa, synthetic construct
PLNGAVHLYAQAQTGSAQN

SEQ ID NO: 349 - protein, 19 aa, synthetic construct
PLNGAVHLYAQAQTGWAQN

SEQ ID NO: 350 - protein, 19 aa, synthetic construct
PLNGAVHLYAQAQTMSVQT

SEQ ID NO: 351 - protein, 19 aa, synthetic construct
PLNGSVHLYAQAQTAWVQN

SEQ ID NO: 352 - protein, 19 aa, synthetic construct
PLNGAVHLYAQAQVGGVQN

SEQ ID NO: 353 - protein, 19 aa, synthetic construct
PLNGAVHLYAKAQTSPVQN

SEQ ID NO: 354 - protein, 19 aa, synthetic construct
PLNGAVHLYAQAQLAPVQT

SEQ ID NO: 355 - protein, 19 aa, synthetic construct
PLDGAVHLYAQAQTALVQN

SEQ ID NO: 356 - protein, 19 aa, synthetic construct
PLNGAVHLYAQAQTALVQN

SEQ ID NO: 357 - protein, 19 aa, synthetic construct
PLNGAVHLYAQAQLAGVQN

SEQ ID NO: 358 - protein, 19 aa, synthetic construct
PLNGAVHLYAQAQRTAVQN

SEQ ID NO: 359 - protein, 19 aa, synthetic construct
PLNGAVHLYAQAQRSPVQN

SEQ ID NO: 360 - protein, 19 aa, synthetic construct
PLNGAVHLYAQAQTLAVQN

SEQ ID NO: 361 - protein, 19 aa, synthetic construct
PLNGAVHLYAQAQLAHVQN

SEQ ID NO: 362 - protein, 19 aa, synthetic construct
PLNGAVHLYAQAQTSLVQN

SEQ ID NO: 363 - protein, 19 aa, synthetic construct
PLNGAVHLYAQAQRLSVQN

SEQ ID NO: 364 - protein, 19 aa, synthetic construct
PLNGAVHLYDQAQLSPVQN

SEQ ID NO: 365 - protein, 19 aa, synthetic construct
PLNGAVHLYAQAQLMGVQN

SEQ ID NO: 366 - protein, 19 aa, synthetic construct
PLNGSVHLYAQAQTGWVQT

SEQ ID NO: 367 - protein, 19 aa, synthetic construct
PLNGAVHLYAQAQSMQVQN

SEQ ID NO: 368 - protein, 19 aa, synthetic construct
PLNGGVHLYAQAQTGWFQN

SEQ ID NO: 369 - protein, 19 aa, synthetic construct
PLNGAVHLYAQAQTQTVQN

SEQ ID NO: 370 - protein, 19 aa, synthetic construct
PLDGAVHLYSQAQTGWVQN

SEQ ID NO: 371 - protein, 19 aa, synthetic construct
PLNGAVHLYAQAQTGWEQN

SEQ ID NO: 372 - protein, 19 aa, synthetic construct
PLNGAVHLYAQAQVGSVQN

SEQ ID NO: 373 - protein, 19 aa, synthetic construct
PLNGAVHLYAQAQVSGVQN

SEQ ID NO: 374 - protein, 19 aa, synthetic construct
PLNGAVHLYAQAQVMAVQN

SEQ ID NO: 375 - protein, 19 aa, synthetic construct
PLNGAVHLYAQAQIGGVQN

SEQ ID NO: 376 - protein, 19 aa, synthetic construct
PLNGAVHLYAQAQIAGVQN

SEQ ID NO: 377 - protein, 19 aa, synthetic construct
PLNGAVHLYAKAQTVSVQN

SEQ ID NO: 378 - protein, 19 aa, synthetic construct
PLNGAVHLYSQAQTGRVQN

SEQ ID NO: 379 - protein, 19 aa, synthetic construct
PLNGAVHLYAQAQLSHVQN

SEQ ID NO: 380 - protein, 19 aa, synthetic construct
PLNGAVHLYAQAQVQTVQN

SEQ ID NO: 381 - protein, 19 aa, synthetic construct
SLDGAVHLYAQAQTGWVQN

SEQ ID NO: 382 - protein, 19 aa, synthetic construct
PLNGAVHLYAQPQTGWDQN

SEQ ID NO: 383 - protein, 19 aa, synthetic construct
PLNGAVHLYAQAQRNSVQN

SEQ ID NO: 384 - protein, 19 aa, synthetic construct
PLNGAVHLYAQAQTLPVQN

SEQ ID NO: 385 - protein, 19 aa, synthetic construct
PLNGAVHLYAQAQTKQVQN

SEQ ID NO: 386 - protein, 19 aa, synthetic construct
PLNGSVHLYAQAQTGWVQN

SEQ ID NO: 387 - protein, 19 aa, synthetic construct
PLNGAVHLYAQAQLGQVQN

SEQ ID NO: 388 - protein, 19 aa, synthetic construct
SLNGAVHLYAQAQTGRVQN

SEQ ID NO: 389 - protein, 19 aa, synthetic construct
PLDGAVHLYAQAQTGWVQN

SEQ ID NO: 390 - protein, 19 aa, synthetic construct
PLNGSVHLYAQAQTGWAQN

SEQ ID NO: 391 - protein, 19 aa, synthetic construct
TLNGAVHLYAQAQVASVQN

SEQ ID NO: 392 - protein, 19 aa, synthetic construct
PLNGAVHLYAQAQNMQVQN

SEQ ID NO: 393 - protein, 19 aa, synthetic construct
PLNGAVHLYAQAQNVQVQN

SEQ ID NO: 394 - protein, 19 aa, synthetic construct
PLNGAVHLYAQAQTGSVQI

SEQ ID NO: 395 - protein, 19 aa, synthetic construct
PLNGTVHLYAQAQTGGVQN

SEQ ID NO: 396 - protein, 19 aa, synthetic construct
PLNGAVHLYAKAQVSPVQN

SEQ ID NO: 397 - protein, 19 aa, synthetic construct
PLNGAVHLYAQAQRGGVQN

SEQ ID NO: 398 - protein, 19 aa, synthetic construct
PLNGGVHLYAQAQTGLVQN

SEQ ID NO: 399 - protein, 19 aa, synthetic construct
PLNGAVHLYAQAQVMSVQN

SEQ ID NO: 400 - protein, 19 aa, synthetic construct
PLNGAVHLYAQAQTTGVQN

SEQ ID NO: 401 - protein, 19 aa, synthetic construct
PLNGAVHLYAQAQLSPVQK

SEQ ID NO: 402 - protein, 19 aa, synthetic construct
SLNGAVHLYAQAQTAAVQN

SEQ ID NO: 403 - protein, 19 aa, synthetic construct
PINGAVHLYAQAQTSPVQN

SEQ ID NO: 404 - protein, 19 aa, synthetic construct
PLNGAVHLYAQAQLSRVQN

SEQ ID NO: 405 - protein, 19 aa, synthetic construct
PLNGAVHLYAQAQVSSVQK

SEQ ID NO: 406 - protein, 19 aa, synthetic construct
PLNGAVHLYAQAQTAPVQT

SEQ ID NO: 407 - protein, 19 aa, synthetic construct
PLNGAVHLYAQAQMAPVQN

SEQ ID NO: 408 - protein, 19 aa, synthetic construct
PLNGAVHLYAQAQILGVQN

SEQ ID NO: 409 - protein, 19 aa, synthetic construct
PLNGAVHLYAQAQTASVQT

SEQ ID NO: 410 - protein, 19 aa, synthetic construct
PLNGAVHLYAQAQTGSLQN

SEQ ID NO: 411 - protein, 19 aa, synthetic construct
PLNGAVHLYAQAQTGTVQN

SEQ ID NO: 412 - protein, 19 aa, synthetic construct
PLNGGVHLYAQAQTGWVQN

SEQ ID NO: 413 - protein, 19 aa, synthetic construct
PLNGAVHLYAQAQTGSVQT

SEQ ID NO: 414 - protein, 19 aa, synthetic construct
PLNGAVHLYAQAQTSSVQT

SEQ ID NO: 415 - protein, 19 aa, synthetic construct
PLNGAVHLYAQAQTSHVQN

SEQ ID NO: 416 - protein, 19 aa, synthetic construct
PLNGGVHLYAQAQTGWDQN

SEQ ID NO: 417 - protein, 19 aa, synthetic construct
PLNGAVHLYAQAQRIGVQN

SEQ ID NO: 418 - protein, 19 aa, synthetic construct
TLNGAVHLYAQAQTTSVQN

SEQ ID NO: 419 - protein, 19 aa, synthetic construct
PLNGAVHLYAQAQTGWGQT

SEQ ID NO: 420 - protein, 19 aa, synthetic construct
PLNGAVHLYAQAQSAMVQN

SEQ ID NO: 421 - protein, 19 aa, synthetic construct
PLNGAVHLYAQAQTSMVQN

SEQ ID NO: 422 - protein, 19 aa, synthetic construct
PLNGAVHLYAQAQSMGVQN

SEQ ID NO: 423 - protein, 19 aa, synthetic construct
PLNGAVHLYAQAQSMSVQN

SEQ ID NO: 424 - protein, 19 aa, synthetic construct
PLNGAVHLYAQAQTSSVQN

SEQ ID NO: 425 - protein, 19 aa, synthetic construct
PLNGAVHLYAQAQTSGVQN

SEQ ID NO: 426 - protein, 19 aa, synthetic construct
PLNGAVHLYAQAQTGAVQN

SEQ ID NO: 427 - protein, 19 aa, synthetic construct
PLNGAVHLYAQAQVNSVQN

SEQ ID NO: 428 - protein, 19 aa, synthetic construct
PLNGAVHLYAQAQVAGVQN

SEQ ID NO: 429 - protein, 19 aa, synthetic construct
PLNGAVHLYAQAQIGSVQN

SEQ ID NO: 430 - protein, 19 aa, synthetic construct
PLDGAVHVYAQAQTGWVQN

SEQ ID NO: 431 - protein, 19 aa, synthetic construct
TLNGAVHLYAQAQTTPVQN

SEQ ID NO: 432 - protein, 19 aa, synthetic construct
PLNGAVHLYAQAQLGSVQN

SEQ ID NO: 433 - protein, 19 aa, synthetic construct
PLNGAVHLYAQAQVNGVQN

SEQ ID NO: 434 - protein, 19 aa, synthetic construct
QLNGAVHLYAQAQLSSVQN

SEQ ID NO: 435 - protein, 19 aa, synthetic construct
PLNGAVHLYAQAQLTAVQN

SEQ ID NO: 436 - protein, 19 aa, synthetic construct
PLNGAVHLYAQAQVQNVQN

SEQ ID NO: 437 - protein, 19 aa, synthetic construct
PLNGAVHLYAQAQTKSVQN

SEQ ID NO: 438 - protein, 19 aa, synthetic construct
PLNGAVHLYAQAQSVGVQN

SEQ ID NO: 439 - protein, 19 aa, synthetic construct
QLNGAVHLYAQAQLGPVQN

SEQ ID NO: 440 - protein, 19 aa, synthetic construct
PLNGAVHLYAQAQTAWVQT

SEQ ID NO: 441 - protein, 19 aa, synthetic construct
PLNGAVHLYAQAQNASVQN

SEQ ID NO: 442 - protein, 19 aa, synthetic construct
PLNGAVHLYAQAQTSAVQN

SEQ ID NO: 443 - protein, 19 aa, synthetic construct
ALNGAVHLYAQAQLAAVQN

SEQ ID NO: 444 - protein, 19 aa, synthetic construct
PLNGAVHLYDQAQVSPVQN

SEQ ID NO: 445 - protein, 19 aa, synthetic construct
PLNGAVHLYAQAQTMSVKN

SEQ ID NO: 446 - protein, 19 aa, synthetic construct
PLNGAVHLYAQAQTANVQN

SEQ ID NO: 447 - protein, 19 aa, synthetic construct
PLNGAVHLYAQAQTGWFQN

SEQ ID NO: 448 - protein, 19 aa, synthetic construct
PLNGNVHLYAQAQTGWVQN

SEQ ID NO: 449 - protein, 19 aa, synthetic construct
PLNGSVHLYAQAQTGWVQS

SEQ ID NO: 450 - protein, 19 aa, synthetic construct
PLNGAVHLYAQAQTGGVLN

SEQ ID NO: 451 - protein, 19 aa, synthetic construct
PLNGAVHLYAQAQLTSVQN

SEQ ID NO: 452 - protein, 19 aa, synthetic construct
PLNGAVHLYAQAQTGWVQT

SEQ ID NO: 453 - protein, 19 aa, synthetic construct
PLNGAVHLYAQAQRSQVQN

SEQ ID NO: 454 - protein, 19 aa, synthetic construct
PLNGAVHIYAQAQVSPVQN

SEQ ID NO: 455 - protein, 19 aa, synthetic construct
PLNGSVHLYAQAQTGWFQN

SEQ ID NO: 456 - protein, 19 aa, synthetic construct
PLNGAVHLYAQAQRIPVQN

SEQ ID NO: 457 - protein, 19 aa, synthetic construct
QLNGAVHLYAQAQLVPVQN

SEQ ID NO: 458 - protein, 19 aa, synthetic construct
PLNGAVHLYAQAQTGWVQD

SEQ ID NO: 459 - protein, 19 aa, synthetic construct
PLNGAVHLYAKAQVSSVQN

SEQ ID NO: 460 - protein, 19 aa, synthetic construct
PLNGAVHLYAQAQRVEVQN

SEQ ID NO: 461 - protein, 19 aa, synthetic construct
PLNGAVHLYAQAQVLPVQN

SEQ ID NO: 462 - protein, 19 aa, synthetic construct
PLNGSVHLYAQAQTGWVRN

SEQ ID NO: 463 - protein, 19 aa, synthetic construct
PLNGTVHLYAQAQSSPVQN

SEQ ID NO: 464 - protein, 19 aa, synthetic construct
PLNGAVHLYAQAQTGGVQK

SEQ ID NO: 465 - protein, 19 aa, synthetic construct
PLNGAVHLYAQAQSVAVQN

SEQ ID NO: 466 - protein, 19 aa, synthetic construct
QLNGAVHLYAQAQLSGVQN

SEQ ID NO: 467 - protein, 19 aa, synthetic construct
PLNGAVHLYAQAQLQQVQN

SEQ ID NO: 468 - protein, 19 aa, synthetic construct
PLNGAVHLYAQAQLSTVQN

SEQ ID NO: 469 - protein, 19 aa, synthetic construct
PLNGAVHLYAQAQSAAVQN

SEQ ID NO: 470 - protein, 19 aa, synthetic construct
SLNGAVHLYAQAQVSAVQN

SEQ ID NO: 471 - protein, 19 aa, synthetic construct
PLNGAVHLYAQAQRTSVQN

SEQ ID NO: 472 - protein, 19 aa, synthetic construct
PLNGAVHLYAQAQTQNVQN

SEQ ID NO: 473 - protein, 19 aa, synthetic construct
PLNGAVHLYAQAQVNAVQN

SEQ ID NO: 474 - protein, 19 aa, synthetic construct
PLNGAVHLYAQAQTVAVQT

SEQ ID NO: 475 - protein, 19 aa, synthetic construct
PLNGAVHLYAQAQLMSVQN

SEQ ID NO: 476 - protein, 19 aa, synthetic construct
PLNGAVHLYAQAQTGWVQN

SEQ ID NO: 477 - protein, 19 aa, synthetic construct
PLNGAVHLYAHAQTGWVQH

SEQ ID NO: 478 - protein, 19 aa, synthetic construct
PLNGAVHLYAQAQTGWVQH

SEQ ID NO: 479 - protein, 19 aa, synthetic construct
PLNGAVHHYAQAQTMSVQN

SEQ ID NO: 480 - protein, 19 aa, synthetic construct
PLNGAVHLYAQAQTGWVQS

SEQ ID NO: 481 - protein, 19 aa, synthetic construct
PLNGAVHLYDQAQTTPVQN

SEQ ID NO: 482 - protein, 19 aa, synthetic construct
PLNGAVHLYAQAQTMMVQN

SEQ ID NO: 483 - protein, 19 aa, synthetic construct
PLNGAVHLYAQAQTGGVQS

SEQ ID NO: 484 - protein, 19 aa, synthetic construct
PLNGAVNLYAQAQTSPVQN

SEQ ID NO: 485 - protein, 19 aa, synthetic construct
ALNGAVHLYAQAQTGLVQN

SEQ ID NO: 486 - protein, 19 aa, synthetic construct
ALNGAVHLYAQAQVATVQN

SEQ ID NO: 487 - protein, 19 aa, synthetic construct
PLNGAVHLYAQAQTGSFQN

SEQ ID NO: 488 - protein, 19 aa, synthetic construct
PLNGAVHLYAQAQRSVVQN

SEQ ID NO: 489 - protein, 19 aa, synthetic construct
PLNGAVHLYAQAQTGSVQK

SEQ ID NO: 490 - protein, 19 aa, synthetic construct
PLNGAVHLYAQAQTQLVQN

SEQ ID NO: 491 - protein, 19 aa, synthetic construct
PLNGAVHLYAQAQTGGVHN

SEQ ID NO: 492 - protein, 19 aa, synthetic construct
PLNGAVHLYAQAQRTPVQN

SEQ ID NO: 493 - protein, 19 aa, synthetic construct
PLNGAVHLYAQAQRQQVQN

SEQ ID NO: 494 - protein, 19 aa, synthetic construct
PLNGAVHLYAQAQTGSVRN

SEQ ID NO: 495 - protein, 19 aa, synthetic construct
PLNGAVHLYAQAQVQGVQN

SEQ ID NO: 496 - protein, 19 aa, synthetic construct
TLNGAVHLYAQAQVSPVQN

SEQ ID NO: 497 - protein, 19 aa, synthetic construct
PLNGAVHLYAQAQPGWVQT

SEQ ID NO: 498 - protein, 19 aa, synthetic construct
PLNGAVHLYAQAQSTQVQN

SEQ ID NO: 499 - protein, 19 aa, synthetic construct
PLNGSVHLYAQAQTGWVEN

SEQ ID NO: 500 - protein, 19 aa, synthetic construct
PLNGAVHLYAQAQQSPVQN

SEQ ID NO: 501 - protein, 19 aa, synthetic construct
PLNGAVHLYAQAQRYSVQN

SEQ ID NO: 502 - protein, 19 aa, synthetic construct
PLNGAVHLYAQAQTGWDQN

SEQ ID NO: 503 - protein, 19 aa, synthetic construct
PLNGAVHLYAQAQTQRVQN

SEQ ID NO: 504 - protein, 19 aa, synthetic construct
ALNGAVHLYAQAQTGWVRN

SEQ ID NO: 505 - protein, 19 aa, synthetic construct
PLNGAVHLYAQPQTGWVQN

SEQ ID NO: 506 - protein, 19 aa, synthetic construct
ALNGAVHLYAQAQVSGVQN

SEQ ID NO: 507 - protein, 19 aa, synthetic construct
PLNGAVHLYAQAQSAGVQN

SEQ ID NO: 508 - protein, 19 aa, synthetic construct
PLNGAVHLYAQAQSAPVQT

SEQ ID NO: 509 - protein, 19 aa, synthetic construct
PLNGAVHLYAQAQRQSVQN

SEQ ID NO: 510 - protein, 19 aa, synthetic construct
PLNGAVHLYAQAQSQPVQN

SEQ ID NO: 511 - protein, 19 aa, synthetic construct
PLNGAVHLYAQAQVASVKN

SEQ ID NO: 512 - protein, 19 aa, synthetic construct
PLNGAVHLYAQAQTAWVRN

SEQ ID NO: 513 - protein, 19 aa, synthetic construct
SLNGAVHLYAQAQTMQVQN

SEQ ID NO: 514 - protein, 19 aa, synthetic construct
PLNGAVNLYAQAQSSPVQN

SEQ ID NO: 515 - protein, 19 aa, synthetic construct
PLNGAVHLYAQAQTGGGQN

SEQ ID NO: 516 - protein, 19 aa, synthetic construct
PLNGAVHLYDQAQVASVQN

SEQ ID NO: 517 - protein, 19 aa, synthetic construct
PLNGAVHLYAQAQSTSVQN

SEQ ID NO: 518 - protein, 19 aa, synthetic construct
PLNGTVHLYAQAQTGWVQH

SEQ ID NO: 519 - protein, 19 aa, synthetic construct
QLNGAVHLYAQAQTSSVQN

SEQ ID NO: 520 - protein, 19 aa, synthetic construct
PLDGAVHLYAQAQTGWVHN

SEQ ID NO: 521 - protein, 19 aa, synthetic construct
PLNGTVHLYAQAQTGWVQK

SEQ ID NO: 522 - protein, 19 aa, synthetic construct
PLNGAVHLYAQAQVLGVQN

SEQ ID NO: 523 - protein, 19 aa, synthetic construct
PLNGAVHLYAQAQNQPVQN

SEQ ID NO: 524 - protein, 19 aa, synthetic construct
PLNGAVHLYAQAQLGTVQN

SEQ ID NO: 525 - protein, 19 aa, synthetic construct
PLNGAVHLYAQAQRAGVQN

SEQ ID NO: 526 - protein, 19 aa, synthetic construct
PVNGAVHLYAQAQTGLVQN

SEQ ID NO: 527 - protein, 19 aa, synthetic construct
PLNGGVHLYAQAQTGWVQH

SEQ ID NO: 528 - protein, 19 aa, synthetic construct
PLNGAVHLYAQAQTGRVQN

SEQ ID NO: 529 - protein, 19 aa, synthetic construct
PLNGAVHLYAQAQTGGVKN

SEQ ID NO: 530 - protein, 19 aa, synthetic construct
PLNGAVHLYAQAQTAWLQN

SEQ ID NO: 531 - protein, 19 aa, synthetic construct
PLNGAVHLYAQAQTRWVQK

SEQ ID NO: 532 - protein, 19 aa, synthetic construct
PLNGAVHLYAQAQLAPVKN

SEQ ID NO: 533 - protein, 19 aa, synthetic construct
PLNGAVHHYAQAQTSSVQN

SEQ ID NO: 534 - protein, 19 aa, synthetic construct
PLNGAVHLYAQAQTGSVQD

SEQ ID NO: 535 - protein, 19 aa, synthetic construct
PLNGAVHLYAQAQTGMVQN

SEQ ID NO: 536 - protein, 19 aa, synthetic construct
PLNGAVHLYAQAQLSNVQN

SEQ ID NO: 537 - protein, 19 aa, synthetic construct
PLNGAVHLYAQAQRLPVQN

SEQ ID NO: 538 - protein, 19 aa, synthetic construct
PLNGAVHLYAQAQRQGVQN

SEQ ID NO: 539 - protein, 19 aa, synthetic construct
PLNGAVHLYAQAQSTPVQT

SEQ ID NO: 540 - protein, 19 aa, synthetic construct
QLNGNVHLYAQAQTGWVQN

SEQ ID NO: 541 - protein, 19 aa, synthetic construct
PLNGGVHLYAQAQTGWVQT

SEQ ID NO: 542 - protein, 19 aa, synthetic construct
PLNGAVHLYAQAQTTPVKN

SEQ ID NO: 543 - protein, 19 aa, synthetic construct
PLNGAVHLYAQAQRLTVQN

SEQ ID NO: 544 - protein, 19 aa, synthetic construct
PLNGAVHLYAQAQTLRVQN

SEQ ID NO: 545 - protein, 19 aa, synthetic construct
PLNGAVHLYAQAQSAFVQN

SEQ ID NO: 546 - protein, 19 aa, synthetic construct
SLNGAVHLYAQAQTNSVQN

SEQ ID NO: 547 - protein, 19 aa, synthetic construct
PLNGAVHLYAQAQSVQVQN

SEQ ID NO: 548 - protein, 19 aa, synthetic construct
PLDGAVHLYAQAQTAAVQN

SEQ ID NO: 549 - protein, 19 aa, synthetic construct
SLNGAVHLYAQAQLMPVQN

SEQ ID NO: 550 - protein, 19 aa, synthetic construct
PLDGAVHLYAQAQTGWVQT

SEQ ID NO: 551 - protein, 19 aa, synthetic construct
PLNGAVHLYAQAQLLPVQN

SEQ ID NO: 552 - protein, 19 aa, synthetic construct
PLNGAVHLYAQAQRTQVQN

SEQ ID NO: 553 - protein, 19 aa, synthetic construct
PLNGAVHLYAQAQTGSDQN

SEQ ID NO: 554 - protein, 19 aa, synthetic construct
PLNGAVHLYAQAQVASDQN

SEQ ID NO: 555 - protein, 19 aa, synthetic construct
PLNGAVNLYAQAQLAPVQN

SEQ ID NO: 556 - protein, 19 aa, synthetic construct
PLNGSVHLYAQAQTGWLQN

SEQ ID NO: 557 - protein, 19 aa, synthetic construct
PLNGTVHLYAQAQTGWVQN

SEQ ID NO: 558 - protein, 19 aa, synthetic construct
PLNGAVHLYAQAQVSPVKN

SEQ ID NO: 559 - protein, 19 aa, synthetic construct
PLNGAVHLYAQAQLPPVQN

SEQ ID NO: 560 - protein, 19 aa, synthetic construct
PLNGAVHLYAQAQSSPVQT

SEQ ID NO: 561 - protein, 19 aa, synthetic construct
PLNGAVHLYAQAQAQPVQN

SEQ ID NO: 562 - protein, 19 aa, synthetic construct
PLNGDVHLYAQAQTTSVQN

SEQ ID NO: 563 - protein, 19 aa, synthetic construct
PLNGAVHLYAQAQTPQVQN

SEQ ID NO: 564 - protein, 19 aa, synthetic construct
PLNGAVHLYAQAQTSWVQN

SEQ ID NO: 565 - protein, 19 aa, synthetic construct
PLNGAVHLYAQAQTGGDQN

SEQ ID NO: 566 - protein, 19 aa, synthetic construct
PLNGAVHLYAQAQLSPVKN

SEQ ID NO: 567 - protein, 19 aa, synthetic construct
PLNGAVHLYAQAQSSPVKN

SEQ ID NO: 568 - protein, 19 aa, synthetic construct
PLNGAVHLYAQAQNTTVQN

SEQ ID NO: 569 - protein, 19 aa, synthetic construct
PLDGAVHLYAQAQTGWVQH

SEQ ID NO: 570 - protein, 19 aa, synthetic construct
PLNGAVHLYAQAQTTRVQN

SEQ ID NO: 571 - protein, 19 aa, synthetic construct
PLDGAVHLYAQAQTGWLQN

SEQ ID NO: 572 - protein, 19 aa, synthetic construct
PLNGSVHLYAQPQTGWVQN

SEQ ID NO: 573 - protein, 19 aa, synthetic construct
PLNGAVHLYSQAQTGLVQN

SEQ ID NO: 574 - protein, 19 aa, synthetic construct
PLNGAVHLYAQAQTQWVQN

SEQ ID NO: 575 - protein, 19 aa, synthetic construct
PLNGSVHLYAQAQTGWVQI

SEQ ID NO: 576 - protein, 19 aa, synthetic construct
PLNGAVHLYAQAQTGSVHN

SEQ ID NO: 577 - protein, 19 aa, synthetic construct
ALNGAVHLYAQAQTGWVQN

SEQ ID NO: 578 - protein, 19 aa, synthetic construct
PLNGTVHLYAQAQTGWVRN

SEQ ID NO: 579 - protein, 19 aa, synthetic construct
PLNGAVHLYAQAQTGGLQN

SEQ ID NO: 580 - protein, 19 aa, synthetic construct
SLNGAVHLYAQAQVSGVQN

SEQ ID NO: 581 - protein, 19 aa, synthetic construct
PLNGAVHLYAQAQTAWVQK

SEQ ID NO: 582 - protein, 19 aa, synthetic construct
PLNGAVHLYAQAQTGRVQT

SEQ ID NO: 583 - protein, 19 aa, synthetic construct
TLNGAVHLYAQAQSAPVQN

SEQ ID NO: 584 - protein, 19 aa, synthetic construct
PLNGAVHLYDQAQTVAVQN

SEQ ID NO: 585 - protein, 19 aa, synthetic construct
QLNGAVHLYAQAQTGSVQN

SEQ ID NO: 586 - protein, 19 aa, synthetic construct
PLNGAVHLYAQAQNTQVQN

SEQ ID NO: 587 - protein, 19 aa, synthetic construct
PLNGAVHLYAQAQTGWLQN

SEQ ID NO: 588 - protein, 19 aa, synthetic construct
PINGAVHLYAQAQTGLVQN

SEQ ID NO: 589 - protein, 19 aa, synthetic construct
PLDGAVHLYAQAQTGWVQI

SEQ ID NO: 590 - protein, 19 aa, synthetic construct
PLNGSVHLYAQAQTGSVQT

SEQ ID NO: 591 - protein, 19 aa, synthetic construct
PLNGAVQLYAQAQTSSVQN

SEQ ID NO: 592 - protein, 19 aa, synthetic construct
PLNGAVHLYAQAQTYAVQN

SEQ ID NO: 593 - protein, 19 aa, synthetic construct
PLNGAVHLYAQAQTLSVQN

SEQ ID NO: 594 - protein, 19 aa, synthetic construct
PLNGAVHLYAQAQNLPVQN

SEQ ID NO: 595 - protein, 19 aa, synthetic construct
PLNGAVHLYAQAQTSSDQN

SEQ ID NO: 596 - protein, 19 aa, synthetic construct
PLNGAVHLYAQAQATSVQN

SEQ ID NO: 597 - protein, 19 aa, synthetic construct
TLNGAVHLYAQAQLSPVQN

SEQ ID NO: 598 - protein, 19 aa, synthetic construct
PLNGAVHLYAQAQTAWFQN

SEQ ID NO: 599 - protein, 19 aa, synthetic construct
TLNGAVHLYAQAQVTPVQN

SEQ ID NO: 600 - protein, 19 aa, synthetic construct
TLNGAVHLYAQAQTAAVQN

SEQ ID NO: 601 - protein, 19 aa, synthetic construct
PLNGAVHLYAQAQATQVQN

SEQ ID NO: 602 - protein, 19 aa, synthetic construct
RLDGAVHLYAQAQTGWVQN

SEQ ID NO: 603 - protein, 19 aa, synthetic construct
QLNGAVHLYAQAQTGWVEN

SEQ ID NO: 604 - protein, 19 aa, synthetic construct
PLNGAVHLYAQAQVSSVKN

SEQ ID NO: 605 - protein, 19 aa, synthetic construct
PLNGAVHLYAQAQLSSVQN

SEQ ID NO: 606 - protein, 19 aa, synthetic construct
PLNGAVHLYAQAQTGSGQN

SEQ ID NO: 607 - protein, 19 aa, synthetic construct
PLNGAVHLYAQAQLQPVQT

SEQ ID NO: 608 - protein, 19 aa, synthetic construct
PINGAVHLYAQAQLSSVQN

SEQ ID NO: 609 - protein, 19 aa, synthetic construct
PINGAVHLYAQAQTVAVQN

SEQ ID NO: 610 - protein, 19 aa, synthetic construct
PLNGAVHLYAQAQVSAVKN

SEQ ID NO: 611 - protein, 19 aa, synthetic construct
SLNGAVHLYAQAQTVAVQN

SEQ ID NO: 612 - protein, 19 aa, synthetic construct
PLNGAVHLYAQAQTQAVQN

SEQ ID NO: 613 - protein, 19 aa, synthetic construct
QLNGAVHLYAQAQTAQVQN

SEQ ID NO: 614 - protein, 19 aa, synthetic construct
PLNGAVHLYDQAQTMSVQN

SEQ ID NO: 615 - protein, 19 aa, synthetic construct
PLNGAVHLYAQPQTGWVQK

SEQ ID NO: 616 - protein, 19 aa, synthetic construct
PLNGAVHLYAQAQVMPVQN

SEQ ID NO: 617 - protein, 19 aa, synthetic construct
PLNGAVHLYAQAQTVSVQK

SEQ ID NO: 618 - protein, 19 aa, synthetic construct
PLNGAVHLYAQAQTAWAQN

SEQ ID NO: 619 - protein, 19 aa, synthetic construct
PLNGAVHLYAQAQNALVQN

SEQ ID NO: 620 - protein, 19 aa, synthetic construct
TLNGAVHLYAQAQVSAVQN

SEQ ID NO: 621 - protein, 19 aa, synthetic construct
PLKGAVHLYAQAQTTPVQN

SEQ ID NO: 622 - protein, 19 aa, synthetic construct
QLNGSVHLYAQAQTGWVQN

SEQ ID NO: 623 - protein, 19 aa, synthetic construct
SLNGAVHLYAQAQVATVQN

SEQ ID NO: 624 - protein, 19 aa, synthetic construct
PLNGAVHLYAQAQRMLVQN

SEQ ID NO: 625 - protein, 19 aa, synthetic construct
PLNGAVHLYAQAQTVAVKN

SEQ ID NO: 626 - protein, 19 aa, synthetic construct
PLNGAVHLYDQAQTTSVQN

SEQ ID NO: 627 - protein, 19 aa, synthetic construct
PLNGAVHLYAQAQRQLVQN

SEQ ID NO: 628 - protein, 19 aa, synthetic construct
PLNGAVHLYAQAQTLGVQN

SEQ ID NO: 629 - protein, 19 aa, synthetic construct
PLNGAVHLYAQAQLGPVQT

SEQ ID NO: 630 - protein, 19 aa, synthetic construct
PLNGGVHLYAQAQTGWVQD

SEQ ID NO: 631 - protein, 19 aa, synthetic construct
PLNGAVHLYAQAQTGSVKN

SEQ ID NO: 632 - protein, 19 aa, synthetic construct
PLNGAVNLYAQAQLASVQN

SEQ ID NO: 633 - protein, 19 aa, synthetic construct
PLNGAVHLYDQAQVSSVQN

SEQ ID NO: 634 - protein, 19 aa, synthetic construct
PLNGAVHLYAQAQTMSDQN

SEQ ID NO: 635 - protein, 19 aa, synthetic construct
PLNGAVHLYAQAQTGWVQK

SEQ ID NO: 636 - protein, 19 aa, synthetic construct
PLNGAVHLYAQAQLASVKN

SEQ ID NO: 637 - protein, 19 aa, synthetic construct
PLNGGVHLYAQAQTGWGQN

SEQ ID NO: 638 - protein, 19 aa, synthetic construct
QLNGSVHLYAQAQTGWVQT

SEQ ID NO: 639 - protein, 19 aa, synthetic construct
QLNGAVHLYAQAQTTGVQN

SEQ ID NO: 640 - protein, 19 aa, synthetic construct
PLNGAVHLYAQAQTGFVQN

SEQ ID NO: 641 - protein, 19 aa, synthetic construct
PLNGAVHLYAQAQSALVQN

SEQ ID NO: 642 - protein, 19 aa, synthetic construct
ALNGAVHLYAQAQTGWDQN

SEQ ID NO: 643 - protein, 19 aa, synthetic construct
QLNGAVHLYAQAQISGVQN

SEQ ID NO: 644 - protein, 19 aa, synthetic construct
QLNGAVHLYAQAQRGSVQN

SEQ ID NO: 645 - protein, 19 aa, synthetic construct
PLNGAVHLYAQAQTGWVKT

SEQ ID NO: 646 - protein, 19 aa, synthetic construct
PLNGAVHLYAQAQSQLVQN

SEQ ID NO: 647 - protein, 19 aa, synthetic construct
PLNGSVHLYAQAQTGWGQN

SEQ ID NO: 648 - protein, 19 aa, synthetic construct
QLNGAVHLYAQAQTGWVPN

SEQ ID NO: 649 - protein, 19 aa, synthetic construct
PLNGAVHLYAKAQTGWVKN

SEQ ID NO: 650 - protein, 19 aa, synthetic construct
PLNGAVHLYAHAQTGWGQN

SEQ ID NO: 651 - protein, 19 aa, synthetic construct
ALNGAVHLYAQAQTGWVQH

SEQ ID NO: 652 - protein, 19 aa, synthetic construct
PLNGSVHLYAQAQIASVQN

SEQ ID NO: 653 - protein, 19 aa, synthetic construct
ALNGAVHLYAQAQTAMVQN

SEQ ID NO: 654 - protein, 19 aa, synthetic construct
TLNGAVHLYAQAQTMAVQN

SEQ ID NO: 655 - protein, 19 aa, synthetic construct
PHNGAVHLYAQAQVSSVQN

SEQ ID NO: 656 - protein, 19 aa, synthetic construct
PLNGAVQLYAQAQTAPVQN

SEQ ID NO: 657 - protein, 19 aa, synthetic construct
PLNGSVHLYAQAQKGSVQN

SEQ ID NO: 658 - protein, 19 aa, synthetic construct
PLNGAVHLYAQAQLSAVQN

SEQ ID NO: 659 - protein, 19 aa, synthetic construct
PINGAVHLYAQAQVSAVQN

SEQ ID NO: 660 - protein, 19 aa, synthetic construct
PLNGSVHLYAQAQTGLVQN

SEQ ID NO: 661 - protein, 19 aa, synthetic construct
PLNGAVHIYAQAQTGWFQN

SEQ ID NO: 662 - protein, 19 aa, synthetic construct
SLNGAVHLYAQAQIASVQN

SEQ ID NO: 663 - protein, 19 aa, synthetic construct
PLNGAVHLYAQEQTVSVQN

SEQ ID NO: 664 - protein, 19 aa, synthetic construct
PLNGAVHLYAQAQTMQVQT

SEQ ID NO: 665 - protein, 19 aa, synthetic construct
HLNGAVHLYAQAQTGWVQN

SEQ ID NO: 666 - protein, 19 aa, synthetic construct
PLNGAVHLYAQAQTGQVQN

SEQ ID NO: 667 - protein, 19 aa, synthetic construct
QLNGAVHLYAQAQTGWVQD

SEQ ID NO: 668 - protein, 19 aa, synthetic construct
PLNGAVHLYDQAQVAQVQN

SEQ ID NO: 669 - protein, 19 aa, synthetic construct
PLNGAVHLYAQAQTSPVKN

SEQ ID NO: 670 - protein, 19 aa, synthetic construct
PLNGAIHLYAQAQTSPVQN

SEQ ID NO: 671 - protein, 19 aa, synthetic construct
PLNGSVHLYAQAQTAMVQN

SEQ ID NO: 672 - protein, 19 aa, synthetic construct
PLNGAVHLYAQAQLSQVQT

SEQ ID NO: 673 - protein, 19 aa, synthetic construct
PLNGAVHLYAQAQTGSVLN

SEQ ID NO: 674 - protein, 19 aa, synthetic construct
PLNGAIHLYAQAQTASVQN

SEQ ID NO: 675 - protein, 19 aa, synthetic construct
PLNGAVHLYAQAQTNGVQN

SEQ ID NO: 676 - protein, 19 aa, synthetic construct
PLNGSVHLYAQAQTGWVQY

SEQ ID NO: 677 - protein, 19 aa, synthetic construct
PLNGALHLYAQAQTSPVQN

SEQ ID NO: 678 - protein, 19 aa, synthetic construct
ALNGAVHLYAQAQTGWVQT

SEQ ID NO: 679 - protein, 19 aa, synthetic construct
PLNGAVHLYAQAQTGWVKK

SEQ ID NO: 680 - protein, 19 aa, synthetic construct
QLNGAVHLYAQAQTGWVQN

SEQ ID NO: 681 - protein, 19 aa, synthetic construct
PLNGDVHLYAQAQTVAVQN

SEQ ID NO: 682 - protein, 19 aa, synthetic construct
PLNGGVHLYAQAQPGWVQN

SEQ ID NO: 683 - protein, 19 aa, synthetic construct
PLNGAVHLYAQAQAAAVQN

SEQ ID NO: 684 - protein, 19 aa, synthetic construct
PLNGAVHLYAQAQSAVVQN

SEQ ID NO: 685 - protein, 19 aa, synthetic construct
TLNGAVHLYAQAQRSSVQN

SEQ ID NO: 686 - protein, 19 aa, synthetic construct
PLNGAVHLYAQAQPGWVQH

SEQ ID NO: 687 - protein, 19 aa, synthetic construct
PLDGAVHLYAQAQTLSVQN

SEQ ID NO: 688 - protein, 19 aa, synthetic construct
PLNGAVHLYAQAQTASDQN

SEQ ID NO: 689 - protein, 19 aa, synthetic construct
PLNGAVHLYAQAQLSGVQN

SEQ ID NO: 690 - protein, 19 aa, synthetic construct
TLNGAVHLYAQAQTVAVQN

SEQ ID NO: 691 - protein, 19 aa, synthetic construct
PLNGAVHLYAQEQVASVQN

SEQ ID NO: 692 - protein, 19 aa, synthetic construct
PVNGAVHLYAQAQTGWAQN

SEQ ID NO: 693 - protein, 19 aa, synthetic construct
PLNGAVHLYAQAQSSRVQN

SEQ ID NO: 694 - protein, 19 aa, synthetic construct
PLNGSVHLYAQAQLGSVQN

SEQ ID NO: 695 - protein, 19 aa, synthetic construct
PLNGAVHLYAQAQSPPVQN

SEQ ID NO: 696 - protein, 19 aa, synthetic construct
PLNGAVHHYAQAQTTSVQN

SEQ ID NO: 697 - protein, 19 aa, synthetic construct
PLNGAVHLYDQAQSTPVQN

SEQ ID NO: 698 - protein, 19 aa, synthetic construct
QLNGAVHLYAQAQTGWVRN

SEQ ID NO: 699 - protein, 19 aa, synthetic construct
PLNGAVHLYAQAQVQPVQT

SEQ ID NO: 700 - protein, 19 aa, synthetic construct
PLNGAVHLYAQAQTSSVKN

SEQ ID NO: 701 - protein, 19 aa, synthetic construct
PLNGALHLYAQAQTASVQN

SEQ ID NO: 702 - protein, 19 aa, synthetic construct
PLNGAVHHYAQAQSAPVQN

SEQ ID NO: 703 - protein, 19 aa, synthetic construct
PLNGSVHLYAQAQTGWVHN

SEQ ID NO: 704 - protein, 19 aa, synthetic construct
PLNGAVHLYAQAQLSPLQN

SEQ ID NO: 705 - protein, 19 aa, synthetic construct
PLNGAVHLYAKAQVTPVQN

SEQ ID NO: 706 - protein, 19 aa, synthetic construct
PLNGAVNLYAQAQTQPVQN

SEQ ID NO: 707 - protein, 19 aa, synthetic construct
SLNGAVHLYAQAQTGLVQN

SEQ ID NO: 708 - protein, 19 aa, synthetic construct
PLDGSVHLYAQAQTGGVQN

SEQ ID NO: 709 - protein, 19 aa, synthetic construct
PLNGAVHLYDQAQTLPVQN

SEQ ID NO: 710 - protein, 19 aa, synthetic construct
PLNGAVHLYAQAQVSQVQK

SEQ ID NO: 711 - protein, 19 aa, synthetic construct
PLNGAVHLYAQAQLVGVQN

SEQ ID NO: 712 - protein, 19 aa, synthetic construct
PLNGAVHLYAQEQTSSVQN

SEQ ID NO: 713 - protein, 19 aa, synthetic construct
PLNGAVHIYAQAQTVAVQN

SEQ ID NO: 714 - protein, 19 aa, synthetic construct
PLNGAVNLYAQAQVTPVQN

SEQ ID NO: 715 - protein, 19 aa, synthetic construct
TLNGAVHLYAQAQTMSVQN

SEQ ID NO: 716 - protein, 19 aa, synthetic construct
TLNGAVHLYAQAQTLAVQN

SEQ ID NO: 717 - protein, 19 aa, synthetic construct
PINGAVHLYAQAQVAQVQN

SEQ ID NO: 718 - protein, 19 aa, synthetic construct
PLNGQVHLYAQAQTGWVQN

SEQ ID NO: 719 - protein, 19 aa, synthetic construct
QLNGAVHLYAQAQTGGVQN

SEQ ID NO: 720 - protein, 19 aa, synthetic construct
PLNGAVHLYAQAQTLSVKN

SEQ ID NO: 721 - protein, 19 aa, synthetic construct
PLNGTVHLYAQAQTGWDQN

SEQ ID NO: 722 - protein, 19 aa, synthetic construct
PLNGAVHLYAQAQTGWFQK

SEQ ID NO: 723 - protein, 19 aa, synthetic construct
ALNGAVHLYAQAQTSKVQN

SEQ ID NO: 724 - protein, 19 aa, synthetic construct
ALNGTVHLYAQAQTGWVQN

SEQ ID NO: 725 - protein, 19 aa, synthetic construct
PLNGAVPLYAQAQTGWVQH

SEQ ID NO: 726 - protein, 19 aa, synthetic construct
PLNGAVHLYAQAKTGWVQK

SEQ ID NO: 727 - protein, 19 aa, synthetic construct
PLNGAVHLYAQAQTPAVQN

SEQ ID NO: 728 - protein, 19 aa, synthetic construct
PLNGAVHLYAQAQTVGVKN

SEQ ID NO: 729 - protein, 19 aa, synthetic construct
PLNGAVHLYAQEQTGWFQN

SEQ ID NO: 730 - protein, 19 aa, synthetic construct
PLNGAVHLYAQAQKGWDQN

SEQ ID NO: 731 - protein, 19 aa, synthetic construct
PLNGAVHLYDQAQTSAVQN

SEQ ID NO: 732 - protein, 19 aa, synthetic construct
PLDGAVHLYAQAQTGWVQK

SEQ ID NO: 733 - protein, 19 aa, synthetic construct
PLNGAVHLYAQAQTAWVLN

SEQ ID NO: 734 - protein, 19 aa, synthetic construct
PLNGSVHLYAQAQTGWVLN

SEQ ID NO: 735 - protein, 19 aa, synthetic construct
QLNGAVHLYAQAQTGWVQT

SEQ ID NO: 736 - protein, 19 aa, synthetic construct
PLNGAVHLYAQAQVPPVQN

SEQ ID NO: 737 - protein, 19 aa, synthetic construct
PVNGAVHLYAQAQVQSVQN

SEQ ID NO: 738 - protein, 19 aa, synthetic construct
QLNGAVHLYAQAQTKSVQN

SEQ ID NO: 739 - protein, 19 aa, synthetic construct
PVNGAVHLYAQAQTSSVQN

SEQ ID NO: 740 - protein, 19 aa, synthetic construct
PLNGAVHLYAQAQATGVQN

SEQ ID NO: 741 - protein, 19 aa, synthetic construct
TLNGAVHLYAQAQLSQVQN

SEQ ID NO: 742 - protein, 19 aa, synthetic construct
PLDGAVHLYAQAQTVSVQN

SEQ ID NO: 743 - protein, 19 aa, synthetic construct
SLNGAVHLYAQAQTKPVQN

SEQ ID NO: 744 - protein, 19 aa, synthetic construct
PLKGAVHLYAQAQSAPVQN

SEQ ID NO: 745 - protein, 19 aa, synthetic construct
PLNGAVHLYAQAKTGWVKN

SEQ ID NO: 746 - protein, 19 aa, synthetic construct
PLNGSVHLYAQAQTLGVQN

SEQ ID NO: 747 - protein, 19 aa, synthetic construct
PLKGAVHLYAQAQLAPVQN

SEQ ID NO: 748 - protein, 19 aa, synthetic construct
PLNGSVHLYAQAQTGWVQK

SEQ ID NO: 749 - protein, 19 aa, synthetic construct
PLNGAVHLYAQAQTGGVQI

SEQ ID NO: 750 - protein, 19 aa, synthetic construct
PLNGAVHLYAQPQTGWVQT

SEQ ID NO: 751 - protein, 19 aa, synthetic construct
PLNGAVHLYAQAQTGWVLN

SEQ ID NO: 752 - protein, 19 aa, synthetic construct
PLNGAVHLYDQAQLTPVQN

SEQ ID NO: 753 - protein, 19 aa, synthetic construct
QLNGAVHLYAQAQTATVQN

SEQ ID NO: 754 - protein, 19 aa, synthetic construct
PLNGAVHLYAQAQTAWGQN

SEQ ID NO: 755 - protein, 19 aa, synthetic construct
PLNGAVHLYAQAQTGWVHN

SEQ ID NO: 756 - protein, 19 aa, synthetic construct
PLKGAVHLYAQAQSSPVQN

SEQ ID NO: 757 - protein, 19 aa, synthetic construct
PLNGAVHLYAQAQLGSVQT

SEQ ID NO: 758 - protein, 19 aa, synthetic construct
PLNGAVHLYAQAQSANVQN

SEQ ID NO: 759 - protein, 19 aa, synthetic construct
PLNGGVHLYAQAQTGSVQN

SEQ ID NO: 760 - protein, 19 aa, synthetic construct
PLNGAVHLYDQAQRSSVQN

SEQ ID NO: 761 - protein, 19 aa, synthetic construct
PLNGAVHLYAQAQTGGVQD

SEQ ID NO: 762 - protein, 19 aa, synthetic construct
PLNGAVHLYAQAQTMAVKN

SEQ ID NO: 763 - protein, 19 aa, synthetic construct
PLNGAVHLYAQAQTASVKN

SEQ ID NO: 764 - protein, 19 aa, synthetic construct
PLNGAVHLYAQAQSSPVQK

SEQ ID NO: 765 - protein, 19 aa, synthetic construct
PLNGAVHLYAQAQTGWVKN

SEQ ID NO: 766 - protein, 19 aa, synthetic construct
ALNGAVHLYAQAQTGGVQN

SEQ ID NO: 767 - protein, 19 aa, synthetic construct
PLNGAVHLYAQAQTGTVQT

SEQ ID NO: 768 - protein, 19 aa, synthetic construct
PLNGAVHLYAQAQTGWVQI

SEQ ID NO: 769 - protein, 19 aa, synthetic construct
PINGAVHLYAQAQTSLVQN

SEQ ID NO: 770 - protein, 19 aa, synthetic construct
PLNGAVHIYAQAQVAQVQN

SEQ ID NO: 771 - protein, 19 aa, synthetic construct
PLNGAVHLYAQAQTVWVKN

SEQ ID NO: 772 - protein, 19 aa, synthetic construct
TLNGAVHLYAQAQLMPVQN

SEQ ID NO: 773 - protein, 19 aa, synthetic construct
PLNGAVHIYAQAQTAPVQN

SEQ ID NO: 774 - protein, 19 aa, synthetic construct
PLYGAVHLYAQAQTASVQN

SEQ ID NO: 775 - protein, 19 aa, synthetic construct
TLNGAVHLYAQAQLGPVQN

SEQ ID NO: 776 - protein, 19 aa, synthetic construct
PLDGAVHLYAQAQTGWVKN

SEQ ID NO: 777 - protein, 19 aa, synthetic construct
PLKGAVHLYAQAQVSPVQN

SEQ ID NO: 778 - protein, 19 aa, synthetic construct
PLNGAVHLYAQAQSQQVQN

SEQ ID NO: 779 - protein, 19 aa, synthetic construct
PLNGAVDLYAQAQLSPVQN

SEQ ID NO: 780 - protein, 19 aa, synthetic construct
PLNGAVHLYAQAQVGSVQT

SEQ ID NO: 781 - protein, 19 aa, synthetic construct
PLNGTVHLYAQAQTGWAQN

SEQ ID NO: 782 - protein, 19 aa, synthetic construct
ALNGAVHLYAQAQTGLVQT

SEQ ID NO: 783 - protein, 19 aa, synthetic construct
PLNGAVHLYAQAQSSMVQN

SEQ ID NO: 784 - protein, 19 aa, synthetic construct
PLNGAVHLYAKAQTAGVQN

SEQ ID NO: 785 - protein, 19 aa, synthetic construct
PLNGAVHLYAHAQTGWVQK

SEQ ID NO: 786 - protein, 19 aa, synthetic construct
PLNGAVHLYAQAQTSPVQK

SEQ ID NO: 787 - protein, 19 aa, synthetic construct
PLNGAVHLYAQAQAVGVQN

SEQ ID NO: 788 - protein, 19 aa, synthetic construct
PLNGAVPLYAQAQTGWGQN

SEQ ID NO: 789 - protein, 19 aa, synthetic construct
PLNGTVHLYAQAQLGSVQN

SEQ ID NO: 790 - protein, 19 aa, synthetic construct
QLNGAVHLYAQAQTGWVQH

SEQ ID NO: 791 - protein, 19 aa, synthetic construct
PLNGSVHLYAQAQTGWVKN

SEQ ID NO: 792 - protein, 19 aa, synthetic construct
PLNGAVHLYDQAQVAPVQN

SEQ ID NO: 793 - protein, 19 aa, synthetic construct
PLNGAVNLYAQAQVSSVQN

SEQ ID NO: 794 - protein, 19 aa, synthetic construct
PLNGAVHLYAQAQTLPVQK

SEQ ID NO: 795 - protein, 19 aa, synthetic construct
PLNGSVHLYAQAQTASVQN

SEQ ID NO: 796 - protein, 19 aa, synthetic construct
ALNGAVHLYAQAQTGWGQN

SEQ ID NO: 797 - protein, 19 aa, synthetic construct
PLNGAVHLYAQAQTGWGQN

SEQ ID NO: 798 - protein, 19 aa, synthetic construct
PLNGAAHLYAQAQTSPVQN

SEQ ID NO: 799 - protein, 19 aa, synthetic construct
PLNGAVHLYAQAQTGRVQH

SEQ ID NO: 800 - protein, 19 aa, synthetic construct
PINGAVHLYAQAQTGWVQS

SEQ ID NO: 801 - protein, 19 aa, synthetic construct
PLNGAVHLYAQAQTPSVQN

SEQ ID NO: 802 - protein, 19 aa, synthetic construct
PLNGAVHLYDQAQTTAVQN

SEQ ID NO: 803 - protein, 19 aa, synthetic construct
PLNGNVHLYAQAQTGWVQK

SEQ ID NO: 804 - protein, 19 aa, synthetic construct
PLNGAVHLYAQAQTGWVEN

SEQ ID NO: 805 - protein, 19 aa, synthetic construct
PLNGAVNLYAQAQTTPVQN

SEQ ID NO: 806 - protein, 19 aa, synthetic construct
PLNGAVNLYAQAQLSQVQN

SEQ ID NO: 807 - protein, 19 aa, synthetic construct
SLNGAVHLYAQAQVMSVQN

SEQ ID NO: 808 - protein, 19 aa, synthetic construct
QLNGAVHLYAQAQTGWVQS

SEQ ID NO: 809 - protein, 19 aa, synthetic construct
PINGAVHLYAQAQTGWFQN

SEQ ID NO: 810 - protein, 19 aa, synthetic construct
PLNGDVHLYAQAQVSSVQN

SEQ ID NO: 811 - protein, 19 aa, synthetic construct
PLNGGVHLYAQAQTGWVQS

SEQ ID NO: 812 - protein, 19 aa, synthetic construct
PLNGAVNLYAQAQRSTVQN

SEQ ID NO: 813 - protein, 19 aa, synthetic construct
ALNGAVHLYAQAQTGWVQY

SEQ ID NO: 814 - protein, 19 aa, synthetic construct
PLNGAVHHYAQAQTAAVQN

SEQ ID NO: 815 - protein, 19 aa, synthetic construct
PLNGAVHRYAQAQTGWVQH

SEQ ID NO: 816 - protein, 19 aa, synthetic construct
QLNGAVHLYAQAQTGWVHN

SEQ ID NO: 817 - protein, 19 aa, synthetic construct
PLNGAVHLYAQAQRGWVQN

SEQ ID NO: 818 - protein, 19 aa, synthetic construct
PLNGAVHLYAQAQTGSVEN

SEQ ID NO: 819 - protein, 19 aa, synthetic construct
ALNGAVHLYAQAQTGWVHN

SEQ ID NO: 820 - protein, 19 aa, synthetic construct
PLNGAVNLYAQAQTLAVQN

SEQ ID NO: 821 - protein, 19 aa, synthetic construct
PLNGAVHLYAQAQSSLVQN

SEQ ID NO: 822 - protein, 19 aa, synthetic construct
ALNGAVHLYAQAQTGWLQN

SEQ ID NO: 823 - protein, 19 aa, synthetic construct
TLNGAVHLYAQAQTLQVQN

SEQ ID NO: 824 - protein, 19 aa, synthetic construct
PLNGAVHLYDQAQVQSVQN

SEQ ID NO: 825 - protein, 19 aa, synthetic construct
SLNGAVHLYAQAQVTGVQN

SEQ ID NO: 826 - protein, 19 aa, synthetic construct
QLNGAVHLYAQAQSAVVQN

SEQ ID NO: 827 - protein, 19 aa, synthetic construct
PLNGVVHLYAQAQTGWVQT

SEQ ID NO: 828 - protein, 19 aa, synthetic construct
PLNGAVHLYAQAQTAWVKN

SEQ ID NO: 829 - protein, 19 aa, synthetic construct
TLNGAVHLYAQAQTLPVQN

SEQ ID NO: 830 - protein, 19 aa, synthetic construct
ALNGAVHLYAQAQTTGVQN

SEQ ID NO: 831 - protein, 19 aa, synthetic construct
PLNGAVHLYAKAQTMAVQN

SEQ ID NO: 832 - protein, 19 aa, synthetic construct
PLNGAVHLYAQAQTYSVQN

SEQ ID NO: 833 - protein, 19 aa, synthetic construct
PLNGCVHLYAQAQTGWVQN

SEQ ID NO: 834 - protein, 19 aa, synthetic construct
PLNGAVHLYAQAQLAAVQT

SEQ ID NO: 835 - protein, 19 aa, synthetic construct
PLNGAVHLYAQAQTALVKN

SEQ ID NO: 836 - protein, 19 aa, synthetic construct
PLNGAVHLYAKAQTVAVQN

SEQ ID NO: 837 - protein, 19 aa, synthetic construct
PLNGAVHLYAHAQTGWVQT

SEQ ID NO: 838 - protein, 19 aa, synthetic construct
PLNGGVHLYAQAQRGSVQN

SEQ ID NO: 839 - protein, 19 aa, synthetic construct
PLNGAFHLYAQAQTGGVQN

SEQ ID NO: 840 - protein, 19 aa, synthetic construct
PLNGAVHLYALAQTSPVQN

SEQ ID NO: 841 - protein, 19 aa, synthetic construct
PLNGAVHLYAQAQTGWVQY

SEQ ID NO: 842 - protein, 19 aa, synthetic construct
PLNGAVHLYAQAQTLPVQT

SEQ ID NO: 843 - protein, 19 aa, synthetic construct
PLNGAVHLYSQAQTGWFQN

SEQ ID NO: 844 - protein, 19 aa, synthetic construct
PLNGAVHLYAQAQTGLVQH

SEQ ID NO: 845 - protein, 19 aa, synthetic construct
PLNGAVHLYAQAQTPTVQN

SEQ ID NO: 846 - protein, 19 aa, synthetic construct
PLYGAVHLYAQAQTAWVQN

SEQ ID NO: 847 - protein, 19 aa, synthetic construct
PLNGAVHLYAKAQTASVQN

SEQ ID NO: 848 - protein, 19 aa, synthetic construct
PLNGAVHLYAQAQTASVQK

SEQ ID NO: 849 - protein, 19 aa, synthetic construct
PLDGSVHLYAQAQTAWVQN

SEQ ID NO: 850 - protein, 19 aa, synthetic construct
PLNGADHLYAQAQTSSVQN

SEQ ID NO: 851 - protein, 19 aa, synthetic construct
PLNGAVHLYAQAQTSPVQI

SEQ ID NO: 852 - protein, 19 aa, synthetic construct
PLNGAVHLYAQAQIGWVQN

SEQ ID NO: 853 - protein, 19 aa, synthetic construct
PLNGAVHLYAKAQTSTVQN

SEQ ID NO: 854 - protein, 19 aa, synthetic construct
PLNGAVHRYAQAQTGWVQT

SEQ ID NO: 855 - protein, 19 aa, synthetic construct
PLNGAVHLYDQAQTSTVQN

SEQ ID NO: 856 - protein, 19 aa, synthetic construct
QLNGAVHLYAQAQTGLVQN

SEQ ID NO: 857 - protein, 19 aa, synthetic construct
PLNGAVNLYAQAQLGPVQN

SEQ ID NO: 858 - protein, 19 aa, synthetic construct
PLNGAVHLYAQAQTGWDKN

SEQ ID NO: 859 - protein, 19 aa, synthetic construct
PLNGALHLYAQAQTGWVKN

SEQ ID NO: 860 - protein, 19 aa, synthetic construct
PLNGNVHLYAHAQTGWVQN

SEQ ID NO: 861 - protein, 19 aa, synthetic construct
PLNGAVHLYAQAQKSSVQN

SEQ ID NO: 862 - protein, 19 aa, synthetic construct
PLNGAVHLYAQAQTGYVQN

SEQ ID NO: 863 - protein, 19 aa, synthetic construct
PVNGAVHLYAQAQVGSVQN

SEQ ID NO: 864 - protein, 19 aa, synthetic construct
PLNGGVHLYAQAQTGWVKN

SEQ ID NO: 865 - protein, 19 aa, synthetic construct
PLNGAVHLYAQAQRGWVQT

SEQ ID NO: 866 - protein, 19 aa, synthetic construct
PLNGAVNLYAQAQRSLVQN

SEQ ID NO: 867 - protein, 19 aa, synthetic construct
PINGAVHLYAQAQTGWDQN

SEQ ID NO: 868 - protein, 19 aa, synthetic construct
PLNGNVHLYAQAQTGWVQT

SEQ ID NO: 869 - protein, 19 aa, synthetic construct
PLNGAVHLYAKAQTGWFQN

SEQ ID NO: 870 - protein, 19 aa, synthetic construct
PLNGAVHLYAQEQTSTVQN

SEQ ID NO: 871 - protein, 19 aa, synthetic construct
PLNGAVHLYAQAQTGGVEN

SEQ ID NO: 872 - protein, 19 aa, synthetic construct
PLNGAVHLYSQAQTGWVQI

SEQ ID NO: 873 - protein, 19 aa, synthetic construct
SLNGAVHLYAQAQTGLVQK

SEQ ID NO: 874 - protein, 19 aa, synthetic construct
PLNGAVHLYAQAQTGCVRN

SEQ ID NO: 875 - protein, 19 aa, synthetic construct
PLNGADHLYAQAQVTPVQN

SEQ ID NO: 876 - protein, 19 aa, synthetic construct
PLNGAVHLYAPAQTGWVQT

SEQ ID NO: 877 - protein, 19 aa, synthetic construct
PLNGDVHLYAQAQTSAVQN

SEQ ID NO: 878 - protein, 19 aa, synthetic construct
TLNGAVHLYAQAQSSLVQN

SEQ ID NO: 879 - protein, 19 aa, synthetic construct
SLNGAVHLYAQAQRSVVQN

SEQ ID NO: 880 - protein, 19 aa, synthetic construct
SLNGAVHLYAQAQTGWVQS

SEQ ID NO: 881 - protein, 19 aa, synthetic construct
PVNGAVHLYAQAQTGWVQS

SEQ ID NO: 882 - protein, 19 aa, synthetic construct
PLNGAVHLYAQAQLSPVQS

SEQ ID NO: 883 - protein, 19 aa, synthetic construct
PLNGAVHLYAQPQTGWLQN

SEQ ID NO: 884 - protein, 19 aa, synthetic construct
PLNGAVNLYAQAQSAPVQN

SEQ ID NO: 885 - protein, 19 aa, synthetic construct
PLNGTVHLYAQAQTGWVPN

SEQ ID NO: 886 - protein, 19 aa, synthetic construct
PVDGAVHLYAQAQTGSVQN

SEQ ID NO: 887 - protein, 19 aa, synthetic construct
PLNGAVHLYDQAQTAAVQN

SEQ ID NO: 888 - protein, 19 aa, synthetic construct
PLKGAVHLYAQAQTSTVQN

SEQ ID NO: 889 - protein, 19 aa, synthetic construct
PLNGAVHLYAQAQTGPVQT

SEQ ID NO: 890 - protein, 19 aa, synthetic construct
PLNGAVHLYAQAQTVGVQK

SEQ ID NO: 891 - protein, 19 aa, synthetic construct
PLNGAVNLYAQAQTSTVQN

SEQ ID NO: 892 - protein, 19 aa, synthetic construct
PLNGAVHLYARAQTVSVQN

SEQ ID NO: 893 - protein, 19 aa, synthetic construct
PLNGAVHLYAQAQTASGQN

SEQ ID NO: 894 - protein, 19 aa, synthetic construct
PLNGAVHLYAQAQSVSVQN

SEQ ID NO: 895 - protein, 19 aa, synthetic construct
PLNGAVHLYAQAQSGPVQT

SEQ ID NO: 896 - protein, 19 aa, synthetic construct
QLNGAVHLYAQAQTGWGQN

SEQ ID NO: 897 - protein, 19 aa, synthetic construct
PLNGAVHLYAQAQVMSVKN

SEQ ID NO: 898 - protein, 19 aa, synthetic construct
PLNGTVHLYAKAQTGSVQN

SEQ ID NO: 899 - protein, 19 aa, synthetic construct
PLNGAVNLYAQAQTSLVQN

SEQ ID NO: 900 - protein, 19 aa, synthetic construct
PINGAVHLYAQAQTLSVQN

SEQ ID NO: 901 - protein, 19 aa, synthetic construct
PLNGAVHLYAQAQLGSVQK

SEQ ID NO: 902 - protein, 19 aa, synthetic construct
TLNGAVHLYAQAQTAMVQN

SEQ ID NO: 903 - protein, 19 aa, synthetic construct
PLNGAVHLYAQAHLSSVQN

SEQ ID NO: 904 - protein, 19 aa, synthetic construct
PLNGAVHLYAKAQVMSVQN

SEQ ID NO: 905 - protein, 19 aa, synthetic construct
PLNGAVHLYAQAQTGLVLN

SEQ ID NO: 906 - protein, 19 aa, synthetic construct
PLNGGVHLYAQAQTGWVQK

SEQ ID NO: 907 - protein, 19 aa, synthetic construct
PLNGAVHLYAKAQTGWVQK

SEQ ID NO: 908 - protein, 19 aa, synthetic construct
PLNGAVLLYAQAQTASVQN

SEQ ID NO: 909 - protein, 19 aa, synthetic construct
PLNGDVHLYAQAQTMAVQN

SEQ ID NO: 910 - protein, 19 aa, synthetic construct
PLNGAVHLYAKAQTAAVQN

SEQ ID NO: 911 - protein, 19 aa, synthetic construct
PLNGAVHLYAQAQTGLVQN

SEQ ID NO: 912 - protein, 19 aa, synthetic construct
PLNGDVHLYAQAQSSPVQN

SEQ ID NO: 913 - protein, 19 aa, synthetic construct
PLNGAVHLYAQAQTSNVQN

SEQ ID NO: 914 - protein, 19 aa, synthetic construct
ALDGAVHLYAQAQTGSVQN

SEQ ID NO: 915 - protein, 19 aa, synthetic construct
PLNGAVHLYSQAQTSSVQN

SEQ ID NO: 916 - protein, 19 aa, synthetic construct
PLKGAVHLYAQAQLSPVQN

SEQ ID NO: 917 - protein, 19 aa, synthetic construct
LLNGAVHLYAQAQTVSVQN

SEQ ID NO: 918 - protein, 19 aa, synthetic construct
PLNGGVHLYAQAQTGWVQI

SEQ ID NO: 919 - protein, 19 aa, synthetic construct
PLNGAVHLYSQAQTGWVRN

SEQ ID NO: 920 - protein, 19 aa, synthetic construct
PLNGAVHLYAQAQTGWGHN

SEQ ID NO: 921 - protein, 19 aa, synthetic construct
PHNGAVHLYAQAQTTSVQN

SEQ ID NO: 922 - protein, 19 aa, synthetic construct
PLNRAVHLYAQAQTGWVQK

SEQ ID NO: 923 - protein, 19 aa, synthetic construct
PLNGAVHLYDQAQRASVQN

SEQ ID NO: 924 - protein, 19 aa, synthetic construct
PLNGAVHLYSQAQTGWVQN

SEQ ID NO: 925 - protein, 19 aa, synthetic construct
PLNGSVHLYAQAQTGTVQN

SEQ ID NO: 926 - protein, 19 aa, synthetic construct
PLNGAVHLYDQAQTSGVQN

SEQ ID NO: 927 - protein, 19 aa, synthetic construct
PLNGAVHLYAQAKTGWFQN

SEQ ID NO: 928 - protein, 19 aa, synthetic construct
KLDGAVHLYAQAQTGLVQN

SEQ ID NO: 929 - protein, 19 aa, synthetic construct
PLNGAVHLYAQAQSQMVQN

SEQ ID NO: 930 - protein, 19 aa, synthetic construct
TLNGAVHLYAQAQTSVVQN

SEQ ID NO: 931 - protein, 19 aa, synthetic construct
PLNGAVHLYAKAQTGTVQN

SEQ ID NO: 932 - protein, 19 aa, synthetic construct
PLNGAVHLYAQAQTVSVHN

SEQ ID NO: 933 - protein, 19 aa, synthetic construct
PLNGAVHLYAQAQLSSVQT

SEQ ID NO: 934 - protein, 19 aa, synthetic construct
PVNGAVHLYAQAQTGWFQN

SEQ ID NO: 935 - protein, 19 aa, synthetic construct
PLNGAVHLYAQAQTASVRN

SEQ ID NO: 936 - protein, 19 aa, synthetic construct
PLNGDVHLYAQAQTSTVQN

SEQ ID NO: 937 - protein, 19 aa, synthetic construct
PLNGAVHLYAKAQLGSVQN

SEQ ID NO: 938 - protein, 19 aa, synthetic construct
PINGAVHLYAQAQLVPVQN

SEQ ID NO: 939 - protein, 19 aa, synthetic construct
PLNGAVHHYAQAQLGPVQN

SEQ ID NO: 940 - protein, 19 aa, synthetic construct
PLNGAVHLYAPAQTGWVQH

SEQ ID NO: 941 - protein, 19 aa, synthetic construct
PLNGAVHLYAQAQVPAVQN

SEQ ID NO: 942 - protein, 19 aa, synthetic construct
PLNGAVNLYAQAQRLSVQN

SEQ ID NO: 943 - protein, 19 aa, synthetic construct
PLNGAVHLYAQAQTGRVQK

SEQ ID NO: 944 - protein, 19 aa, synthetic construct
PLNGAVLLYAQAQTVSVQN

SEQ ID NO: 945 - protein, 19 aa, synthetic construct
PLNGAVHLYAQAQAMSVQN

SEQ ID NO: 946 - protein, 19 aa, synthetic construct
PLNGAVHLYAQAQTAWVHN

SEQ ID NO: 947 - protein, 19 aa, synthetic construct
PLNGAVHLYAQPQTGWVRN

SEQ ID NO: 948 - protein, 19 aa, synthetic construct
PLNGAVHLYAQEQTGWLQN

SEQ ID NO: 949 - protein, 19 aa, synthetic construct
PLNGAVHLYAKAQTSAVQN

SEQ ID NO: 950 - protein, 19 aa, synthetic construct
PLNGSVHLYAQAQTVWVQN

SEQ ID NO: 951 - protein, 19 aa, synthetic construct
PLNGTVHLYAQAQTGWFQN

SEQ ID NO: 952 - protein, 19 aa, synthetic construct
PLNGAVNLYAQAQVASVQN

SEQ ID NO: 953 - protein, 19 aa, synthetic construct
PLNGAVHLYAQAQTGLVRN

SEQ ID NO: 954 - protein, 19 aa, synthetic construct
PLNGAVNLYAQAQLSTVQN

SEQ ID NO: 955 - protein, 19 aa, synthetic construct
PLNGAVHLYAKAQTQPVQN

SEQ ID NO: 956 - protein, 19 aa, synthetic construct
PLNGTVHLYAQAQTGWGQN

SEQ ID NO: 957 - protein, 19 aa, synthetic construct
PLNGAVHLYAQAQRTLVQT

SEQ ID NO: 958 - protein, 19 aa, synthetic construct
PLNGAVHLYAQAQTGSIQN

SEQ ID NO: 959 - protein, 19 aa, synthetic construct
QLNGAVHLYAQAQTGWDQN

SEQ ID NO: 960 - protein, 19 aa, synthetic construct
PLNGAVHLYAQAQLSSVKN

SEQ ID NO: 961 - protein, 19 aa, synthetic construct
QLNGAVHLYAQAQTVSVQN

SEQ ID NO: 962 - protein, 19 aa, synthetic construct
PLNGAVHLYAQAQTLQVQK

SEQ ID NO: 963 - protein, 19 aa, synthetic construct
TLNGAVHLYAQAQVLPVQN

SEQ ID NO: 964 - protein, 19 aa, synthetic construct
PLNGAVHLYAQAQVGSVKN

SEQ ID NO: 965 - protein, 19 aa, synthetic construct
PLNGAVHLYAQAQLAPLQN

SEQ ID NO: 966 - protein, 19 aa, synthetic construct
QLNGAVHLYAQAQTGSVKN

SEQ ID NO: 967 - protein, 19 aa, synthetic construct
PLNGAVHHYAQAQRSTVQN

SEQ ID NO: 968 - protein, 19 aa, synthetic construct
QLNGSVHLYAQAQTGRVQN

SEQ ID NO: 969 - protein, 19 aa, synthetic construct
TLNGAVHLYAQAQVKPVQN

SEQ ID NO: 970 - protein, 19 aa, synthetic construct
PLNGTVHLYAQAQTGLVQN

SEQ ID NO: 971 - protein, 19 aa, synthetic construct
PLNGAVHLYAQAQTPGVQN

SEQ ID NO: 972 - protein, 19 aa, synthetic construct
PINGAVHLYAQAQTSSVQN

SEQ ID NO: 973 - protein, 19 aa, synthetic construct
PLNGAVHLYAQAQLSAVQT

SEQ ID NO: 974 - protein, 19 aa, synthetic construct
PLNGAVHLYSQAQTGWDQN

SEQ ID NO: 975 - protein, 19 aa, synthetic construct
PLNCAVHLYAQAQTGWVQN

SEQ ID NO: 976 - protein, 19 aa, synthetic construct
PLNGAVNLYAQAQTMPVQN

SEQ ID NO: 977 - protein, 19 aa, synthetic construct
PLNGAVHLYSQAQTVAVQN

SEQ ID NO: 978 - protein, 19 aa, synthetic construct
PLNGTVHLYAQAQTGWVKN

SEQ ID NO: 979 - protein, 19 aa, synthetic construct
PLNGGVHLYAQAQTGWVHN

SEQ ID NO: 980 - protein, 19 aa, synthetic construct
QLNGAVHLYAQAQTGWVQK

SEQ ID NO: 981 - protein, 19 aa, synthetic construct
PLNGAVQLYAQAQTLAVQN

SEQ ID NO: 982 - protein, 19 aa, synthetic construct
PLNGTVHLYAQAQVGSVQN

SEQ ID NO: 983 - protein, 19 aa, synthetic construct
PLNGGVHLYAQAQTGGVQN

SEQ ID NO: 984 - protein, 19 aa, synthetic construct
PLKGAVHLYAQAQVSQVQN

SEQ ID NO: 985 - protein, 19 aa, synthetic construct
PLNGAVHHYAQAQTQPVQN

SEQ ID NO: 986 - protein, 19 aa, synthetic construct
PLNGAVHLYAQAPTGWVQT

SEQ ID NO: 987 - protein, 19 aa, synthetic construct
PLNGAVNLYAQAQTMSVQN

SEQ ID NO: 988 - protein, 19 aa, synthetic construct
PLNGAVHLYAQAQTGVVQN

SEQ ID NO: 989 - protein, 19 aa, synthetic construct
PLNGAVHLYAQAQVPQVQN

SEQ ID NO: 990 - protein, 19 aa, synthetic construct
PHNGAVHLYAQAQTMSVQN

SEQ ID NO: 991 - protein, 19 aa, synthetic construct
QLNGAVHLYAQAQTGWLQN

SEQ ID NO: 992 - protein, 19 aa, synthetic construct
PLNGAVHLYAQAQTGCVQK

SEQ ID NO: 993 - protein, 19 aa, synthetic construct
SLNGAVHLYAQAQTSLVQN

SEQ ID NO: 994 - protein, 19 aa, synthetic construct
PLNGAVHLYAQAQTRWVQT

SEQ ID NO: 995 - protein, 19 aa, synthetic construct
TLNGAVHLYAQAQTVQVQN

SEQ ID NO: 996 - protein, 19 aa, synthetic construct
ALNGAVHLYAQAQKGGVQN

SEQ ID NO: 997 - protein, 19 aa, synthetic construct
PLNGAVHLYDQAQVSGVQN

SEQ ID NO: 998 - protein, 19 aa, synthetic construct
PLNGAVHLYAQAQTGLDQN

SEQ ID NO: 999 - protein, 19 aa, synthetic construct
PLNGAVPLYAQAQTGWVQT

SEQ ID NO: 1000 - protein, 19 aa, synthetic construct
PLNGAVHLYAQAQVSSVHN

SEQ ID NO: 1001 - protein, 19 aa, synthetic construct
TLNGAVHLYAQAQTNSVQN

SEQ ID NO: 1002 - protein, 19 aa, synthetic construct
PLNGAGHLYAQAQLSPVQN

SEQ ID NO: 1003 - protein, 19 aa, synthetic construct
HLNGAVHLYAQAQTGRVQN

SEQ ID NO: 1004 - protein, 19 aa, synthetic construct
PLNGAVHLYDQAQTAMVQN

SEQ ID NO: 1005 - protein, 19 aa, synthetic construct
PINGAVHLYAQAQTGWVQH

SEQ ID NO: 1006 - protein, 19 aa, synthetic construct
PLNGAVQLYAQAQTLQVQN

SEQ ID NO: 1007 - protein, 19 aa, synthetic construct
PLNGAVHLYAQAQKGWVQT

SEQ ID NO: 1008 - protein, 19 aa, synthetic construct
PLNGAVHHYAQAQSTSVQN

SEQ ID NO: 1009 - protein, 19 aa, synthetic construct
PLNGYVHLYAQAQTGWVQN

SEQ ID NO: 1010 - protein, 19 aa, synthetic construct
PLNGAVHIYAQAQVQSVQN

SEQ ID NO: 1011 - protein, 19 aa, synthetic construct
PLIGAVHLYAQAQLSPVQN

SEQ ID NO: 1012 - protein, 19 aa, synthetic construct
TLNGAVHLYAQAQLLPVQN

SEQ ID NO: 1013 - protein, 19 aa, synthetic construct
PLNGAVHLYSQAQTGWVQT

SEQ ID NO: 1014 - protein, 19 aa, synthetic construct
ALNGAVHLYAQAQTQLVQN

SEQ ID NO: 1015 - protein, 19 aa, synthetic construct
PLNGAVHLYAQAQSLPVQN

SEQ ID NO: 1016 - protein, 19 aa, synthetic construct
PVNGAVHLYAQAQTGWVPN

SEQ ID NO: 1017 - protein, 19 aa, synthetic construct
PLNGAVHLYAQAKTVSVQN

SEQ ID NO: 1018 - protein, 19 aa, synthetic construct
PLNGAVHLYAQAQTTSVHN

SEQ ID NO: 1019 - protein, 19 aa, synthetic construct
PVNGAVHLYAQAQTGWVQN

SEQ ID NO: 1020 - protein, 19 aa, synthetic construct
PLNGAVHLYAQAHTGWVQI

SEQ ID NO: 1021 - protein, 19 aa, synthetic construct
PLNGAVRLYAQAQTASVQN

SEQ ID NO: 1022 - protein, 19 aa, synthetic construct
PLNGGVHLYAQAQTGLVQK

SEQ ID NO: 1023 - protein, 19 aa, synthetic construct
PLNGAVNLYAQAQVMSVQN

SEQ ID NO: 1024 - protein, 19 aa, synthetic construct
PLNGAVNLYAQAQSMSVQN

SEQ ID NO: 1025 - protein, 19 aa, synthetic construct
PLNGAVHLYAPAQTGWGQN

SEQ ID NO: 1026 - protein, 19 aa, synthetic construct
QLNGAVHLYAQAQTGWAQN

SEQ ID NO: 1027 - protein, 19 aa, synthetic construct
PLNGAVHLYAQAQTVWVQN

SEQ ID NO: 1028 - protein, 19 aa, synthetic construct
QLNGAVHLYAQAQSVSVQN

SEQ ID NO: 1029 - protein, 19 aa, synthetic construct
PLNGAVHLYAQAQTAQLQN

SEQ ID NO: 1030 - protein, 19 aa, synthetic construct
PLNGAVHLYAQAHVASVQN

SEQ ID NO: 1031 - protein, 19 aa, synthetic construct
PLNGAVHLYAKAQRSTVQN

SEQ ID NO: 1032 - protein, 19 aa, synthetic construct
QLNGAVHLYAQAQTGWVKN

SEQ ID NO: 1033 - protein, 19 aa, synthetic construct
PLNGAVHLYAQAQTRWVKN

SEQ ID NO: 1034 - protein, 19 aa, synthetic construct
PLNGAVHLYAQAQTAWIQN

SEQ ID NO: 1035 - protein, 19 aa, synthetic construct
PLNGAVHLYAQAQLSQVKN

SEQ ID NO: 1036 - protein, 19 aa, synthetic construct
SLNGAVHLYAQAQTGWVQN

SEQ ID NO: 1037 - protein, 19 aa, synthetic construct
PLNGAVHLYAQAQTSTVKN

SEQ ID NO: 1038 - protein, 19 aa, synthetic construct
PLNGAVHLYAQAQALPVQN

SEQ ID NO: 1039 - protein, 19 aa, synthetic construct
PLNGAVHLYDQAQTGWFQN

SEQ ID NO: 1040 - protein, 19 aa, synthetic construct
PLNGAVHVYAQAQTGWFQN

SEQ ID NO: 1041 - protein, 19 aa, synthetic construct
PINGAVHLYAQAQVGSVQN

SEQ ID NO: 1042 - protein, 19 aa, synthetic construct
PLNGSVHLYAQAQTTGVQN

SEQ ID NO: 1043 - protein, 19 aa, synthetic construct
PLNGAVHLYAKAQASPVQN

SEQ ID NO: 1044 - protein, 19 aa, synthetic construct
PLNGSVHLYAQAQKAWVQN

SEQ ID NO: 1045 - protein, 19 aa, synthetic construct
SLNGAVHLYAQAQVLGVQN

SEQ ID NO: 1046 - protein, 19 aa, synthetic construct
PLNGAVHLYAQEQLMPVQN

SEQ ID NO: 1047 - protein, 19 aa, synthetic construct
ALNGAVHLYAQSQTGWVQN

SEQ ID NO: 1048 - protein, 19 aa, synthetic construct
PLNGYVHLYDQAQTGWVQN

SEQ ID NO: 1049 - protein, 19 aa, synthetic construct
PLNGAVHLYAQAQTSMVQT

SEQ ID NO: 1050 - protein, 19 aa, synthetic construct
QLNGAVHLYAQAQISSVQN

SEQ ID NO: 1051 - protein, 19 aa, synthetic construct
PVNGAVHLYAQAQTGWVQT

SEQ ID NO: 1052 - protein, 19 aa, synthetic construct
PLNGAVHLYAQEQTATVQN

SEQ ID NO: 1053 - protein, 19 aa, synthetic construct
PLNGAVYLYAQAQTVSVQN

SEQ ID NO: 1054 - protein, 19 aa, synthetic construct
PLNGNVHLYAQAQTASVQN

SEQ ID NO: 1055 - protein, 19 aa, synthetic construct
PLNGYVHLYAQAQTGLVQN

SEQ ID NO: 1056 - protein, 19 aa, synthetic construct
PLNGAVHLYDQAQTLSVQN

SEQ ID NO: 1057 - protein, 19 aa, synthetic construct
PLNGAVHLYAQAQTSSVQH

SEQ ID NO: 1058 - protein, 19 aa, synthetic construct
SLNGAVHLYAQAQTGWVPN

SEQ ID NO: 1059 - protein, 19 aa, synthetic construct
PLNGAVHLYAQAQTAMVKN

SEQ ID NO: 1060 - protein, 19 aa, synthetic construct
TLNGAVHLYAQAQRLSVQN

SEQ ID NO: 1061 - protein, 19 aa, synthetic construct
ALNGAVHLYAQAQTGWVQK

SEQ ID NO: 1062 - protein, 19 aa, synthetic construct
PLNGAVHLYAKAQTALVQN

SEQ ID NO: 1063 - protein, 19 aa, synthetic construct
QLNGAVHLYAQAQTAKVQN

SEQ ID NO: 1064 - protein, 19 aa, synthetic construct
PLNGADHLYAQAQTTSVQN

SEQ ID NO: 1065 - protein, 19 aa, synthetic construct
PLNGAVHLYAQAQTPWVQN

SEQ ID NO: 1066 - protein, 19 aa, synthetic construct
PLNGTVHLYAQAQTGWIQN

SEQ ID NO: 1067 - protein, 19 aa, synthetic construct
PLNGAVHLYAQAHTGWVQH

SEQ ID NO: 1068 - protein, 19 aa, synthetic construct
PLNGAVHLYARAQTASVQN

SEQ ID NO: 1069 - protein, 19 aa, synthetic construct
TLNGAVHLYAQAQRSLVQN

SEQ ID NO: 1070 - protein, 19 aa, synthetic construct
PLNGAVHLYAQAHTGWVQK

SEQ ID NO: 1071 - protein, 19 aa, synthetic construct
PLNGDVHLYAQAQTAQVQN

SEQ ID NO: 1072 - protein, 19 aa, synthetic construct
TLNGAVHLYAQAQTQPVQN

SEQ ID NO: 1073 - protein, 19 aa, synthetic construct
PLNGAVHLYAQAQTPRVQN

SEQ ID NO: 1074 - protein, 19 aa, synthetic construct
PRNGAVHLYAQAQTMSVQN

SEQ ID NO: 1075 - protein, 19 aa, synthetic construct
PLNGAVHLYAQAHTVSVQN

SEQ ID NO: 1076 - protein, 19 aa, synthetic construct
PVNGAVHLYAQAQTGLVQT

SEQ ID NO: 1077 - protein, 19 aa, synthetic construct
PLNGAVHLYAQAQSSSVQN

SEQ ID NO: 1078 - protein, 19 aa, synthetic construct
PLNGAVHLYAQAQRPPVQN

SEQ ID NO: 1079 - protein, 19 aa, synthetic construct
PLNGAVHLYTQAQVSPVQN

SEQ ID NO: 1080 - protein, 19 aa, synthetic construct
PLNGAVPLYAQAQTTPVQN

SEQ ID NO: 1081 - protein, 19 aa, synthetic construct
ALNGAVHLYAQAQTGWVKN

SEQ ID NO: 1082 - protein, 19 aa, synthetic construct
SLNGAVHLYAQAQTGWVRN

SEQ ID NO: 1083 - protein, 19 aa, synthetic construct
PLNGAVHLYAQAQLAGVKN

SEQ ID NO: 1084 - protein, 19 aa, synthetic construct
PLNGAVHLYAQAQTSPAQN

SEQ ID NO: 1085 - protein, 19 aa, synthetic construct
PLNGAVHLYAKAQLSSVQN

SEQ ID NO: 1086 - protein, 19 aa, synthetic construct
PLNGAVHLYAQAQRSPVQT

SEQ ID NO: 1087 - protein, 19 aa, synthetic construct
PLNGAVHLYAHAQTMSVQN

SEQ ID NO: 1088 - protein, 19 aa, synthetic construct
PLNGNVHLYAQAQTGWVKN

SEQ ID NO: 1089 - protein, 19 aa, synthetic construct
PLNGAVHLYAQAQTGWVPH

SEQ ID NO: 1090 - protein, 19 aa, synthetic construct
PLNGAVHLYAQAQPGWGQN

SEQ ID NO: 1091 - protein, 19 aa, synthetic construct
PLNGVVHLYAQAQTVSVQN

SEQ ID NO: 1092 - protein, 19 aa, synthetic construct
PLNGDVHLYAQAQTSSVQN

SEQ ID NO: 1093 - protein, 19 aa, synthetic construct
PLNGAVHIYAQAQTLSVQN

SEQ ID NO: 1094 - protein, 19 aa, synthetic construct
PLNGAVHLYAQAQIPPVQN

SEQ ID NO: 1095 - protein, 19 aa, synthetic construct
SLNGAVHLYAQAQTGWVQH

SEQ ID NO: 1096 - protein, 19 aa, synthetic construct
PLNAAVHLYAQAQTGWDQN

SEQ ID NO: 1097 - protein, 19 aa, synthetic construct
PLNGAVHRYAQAQTTSVQN

SEQ ID NO: 1098 - protein, 19 aa, synthetic construct
PLNGSVHLYAQAQPGSVQN

SEQ ID NO: 1099 - protein, 19 aa, synthetic construct
PLDGAVHLYAQAQTGWVEN

SEQ ID NO: 1100 - protein, 19 aa, synthetic construct
PLNGAVHLYAQAQTGRVKN

SEQ ID NO: 1101 - protein, 19 aa, synthetic construct
PLNGAVHLYAQAQTGRLQN

SEQ ID NO: 1102 - protein, 19 aa, synthetic construct
PLNGSVHLYAQAQTARVQN

SEQ ID NO: 1103 - protein, 19 aa, synthetic construct
PLNGAVHLYDQAQLSSVQN

SEQ ID NO: 1104 - protein, 19 aa, synthetic construct
ALNGAVHLYAQAQTRLVQN

SEQ ID NO: 1105 - protein, 19 aa, synthetic construct
PLNGAVNLYAQAQTAQVQN

SEQ ID NO: 1106 - protein, 19 aa, synthetic construct
PLNGAVHLYAQAQLSSVQH

SEQ ID NO: 1107 - protein, 19 aa, synthetic construct
PLNGAVHLYAQAHTGPVQN

SEQ ID NO: 1108 - protein, 19 aa, synthetic construct
PLKGAVHLYAQAQTLSVQN

SEQ ID NO: 1109 - protein, 19 aa, synthetic construct
ALNGAVHLYAQAQKAWVQN

SEQ ID NO: 1110 - protein, 19 aa, synthetic construct
PLNGAVHLYAQAQAGWVQT

SEQ ID NO: 1111 - protein, 19 aa, synthetic construct
PLNGAVHLYAQAQTGLVQS

SEQ ID NO: 1112 - protein, 19 aa, synthetic construct
PLNGAVHLYAQAQTGCVQI

SEQ ID NO: 1113 - protein, 19 aa, synthetic construct
QLNGAVHLYAQAQPGWVQN

SEQ ID NO: 1114 - protein, 19 aa, synthetic construct
PLNGAVHLYAQAQRPGVQN

SEQ ID NO: 1115 - protein, 19 aa, synthetic construct
PLNGAVHLYAQAQTAAVQH

SEQ ID NO: 1116 - protein, 19 aa, synthetic construct
PLNGADHLYAQAQTMPVQN

SEQ ID NO: 1117 - protein, 19 aa, synthetic construct
PLNGAVHLYAKAQTGWVQT

SEQ ID NO: 1118 - protein, 19 aa, synthetic construct
QLNGAVHLYAQAQKAWVQN

SEQ ID NO: 1119 - protein, 19 aa, synthetic construct
PLNGAVHLYAQAQTGCDQN

SEQ ID NO: 1120 - protein, 19 aa, synthetic construct
PLNGTVHLYAQEQTGSVQN

SEQ ID NO: 1121 - protein, 19 aa, synthetic construct
PLNGAVNLYAQAQSSLVQN

SEQ ID NO: 1122 - protein, 19 aa, synthetic construct
ALNGAVHLYAQAQTGWVEN

SEQ ID NO: 1123 - protein, 19 aa, synthetic construct
PLNGTVHLYAQAQTGWVQY

SEQ ID NO: 1124 - protein, 19 aa, synthetic construct
PINGAVHLYAQAQTGWVQK

SEQ ID NO: 1125 - protein, 19 aa, synthetic construct
PLNGAVHLYAQAQTGRVRN

SEQ ID NO: 1126 - protein, 19 aa, synthetic construct
PLNGAVHLYAQAQTGRDQN

SEQ ID NO: 1127 - protein, 19 aa, synthetic construct
QLNGAVHLYAQAQSALVQN

SEQ ID NO: 1128 - protein, 19 aa, synthetic construct
PLNGVVHLYAQAQTGWVQK

SEQ ID NO: 1129 - protein, 19 aa, synthetic construct
PLNGAVHLYAQAHTGWGQN

SEQ ID NO: 1130 - protein, 19 aa, synthetic construct
PLNGDVHLYAQAQRSLVQN

SEQ ID NO: 1131 - protein, 19 aa, synthetic construct
PLNGNVHLYAQAQTVWVQN

SEQ ID NO: 1132 - protein, 19 aa, synthetic construct
PLNGAVHLYAQAPTGWVQH

SEQ ID NO: 1133 - protein, 19 aa, synthetic construct
PLNGAVHLYSQAQTGWGQN

SEQ ID NO: 1134 - protein, 19 aa, synthetic construct
ALNGSVHLYAQAQTGWVQT

SEQ ID NO: 1135 - protein, 19 aa, synthetic construct
PLNGAVQLYAQAQRSTVQN

SEQ ID NO: 1136 - protein, 19 aa, synthetic construct
PLNGTVHLYAQAQTGTVQN

SEQ ID NO: 1137 - protein, 19 aa, synthetic construct
PLNGTVHLYAQAQTGWVQI

SEQ ID NO: 1138 - protein, 19 aa, synthetic construct
QLNGYVHLYAQAQTGWVQN

SEQ ID NO: 1139-1173 - skipped (35 entries)

SEQ ID NO: 1174 - protein, 19 aa, synthetic construct
PLNSAVHLYAQAQTGWVKN

SEQ ID NO: 1175 - protein, 19 aa, synthetic construct
PLSGAVHLYAQAQTGWVKN

SEQ ID NO: 1176 - protein, 19 aa, synthetic construct
PPNGAVHLYAQAQTGWVKN

SEQ ID NO: 1177 - protein, 19 aa, synthetic construct
PRNGAVHLYAQAQTGWVKN

SEQ ID NO: 1178 - protein, 19 aa, synthetic construct
PVNGAVHLYAQAQTGWVKN

SEQ ID NO: 1179 - protein, 19 aa, synthetic construct
QLNGAVHIYAQAQTGWVKN

SEQ ID NO: 1180 - protein, 19 aa, synthetic construct
QLNGAVHLYAQAQTGCVKN

SEQ ID NO: 1181 - protein, 19 aa, synthetic construct
QLNGAVHLYAQAQTGLVKN

SEQ ID NO: 1182 - protein, 19 aa, synthetic construct
QLNGAVHLYDQAQTGWVKN

SEQ ID NO: 1183 - protein, 19 aa, synthetic construct
RLNGAVHLYAQAQTGWVKN

SEQ ID NO: 1184 - protein, 19 aa, synthetic construct
SINGAVHLYAQAQTGWVKN

SEQ ID NO: 1185 - protein, 19 aa, synthetic construct
SLNGAVHLYAQAQTGWVKN

SEQ ID NO: 1186 - protein, 19 aa, synthetic construct
SLNGAVNLYAQAQTGWVKN

SEQ ID NO: 1187 - protein, 19 aa, synthetic construct
TLNGAVHLYAQAQTGWVKN

SEQ ID NO: 1188 - protein, 19 aa, synthetic construct
TLNGAVNLYAQAQTGWVKN

SEQ ID NO: 1189 - protein, 19 aa, synthetic construct
PLNGAVHHYAQAQTGWVPN

SEQ ID NO: 1190 - protein, 19 aa, synthetic construct
PLNGAVHLNAQAQTGWVPN

SEQ ID NO: 1191 - protein, 19 aa, synthetic construct
PLNGAVHLSAQAQTGWVPN

SEQ ID NO: 1192 - protein, 19 aa, synthetic construct
PLNGAVHLYAQAQTGCVPN

SEQ ID NO: 1193 - protein, 19 aa, synthetic construct
PLNGAVNLYAQAQTGWVPN

SEQ ID NO: 1194 - protein, 12 aa, synthetic construct
AQAQAQTGWVQN

SEQ ID NO: 1195 - protein, 20 aa, synthetic construct
VATNHQSAQAQAQTGWVQNQ

SEQ ID NO: 1196 - protein, 12 aa, synthetic construct
TNHQSAQAQAQT

SEQ ID NO: 1197 - protein, 7 aa, synthetic construct
AQAQAQT

SEQ ID NO: 1198 - protein, 13 aa, synthetic construct
ATNHQSAQAQAQT

SEQ ID NO: 1199-1261 - skipped (63 entries)

SEQ ID NO: 1262 - protein, 7 aa, synthetic construct
TLAVPFK

SEQ ID NO: 1263-1723 - skipped (461 entries)

SEQ ID NO: 1724 - DNA, 12 bp, synthetic construct
  source 1..12: mol_type = other DNA
agaaagaggcga

SEQ ID NO: 1725 - DNA, 12 bp, synthetic construct
  source 1..12: mol_type = other DNA
cgggccaagcgg

SEQ ID NO: 1726 - DNA, 54 bp, synthetic construct
  source 1..54: mol_type = other DNA
gagggcagaggaagtcttctaacatgcggtgacgtggaggagaatcccggccct

SEQ ID NO: 1727 - DNA, 75 bp, synthetic construct
  source 1..75: mol_type = other DNA
ggaagcggagtgaaacagactttgaattttgaccttctcaagttggcgggagacgtggagtccaaccctggacct

SEQ ID NO: 1728 - DNA, 66 bp, synthetic construct
  source 1..66: mol_type = other DNA
ggaagcggagctactaacttcagcctgctgaagcaggctggagacgtggaggagaaccctggacct

SEQ ID NO: 1729 - DNA, 18 bp, synthetic construct
  source 1..18: mol_type = other DNA
tccggaggcggcggcagc

SEQ ID NO: 1730 - DNA, 45 bp, synthetic construct
  source 1..45: mol_type = other DNA
ggaggggggggttcgggtggcggcggaagtgggggcggtggttct

SEQ ID NO: 1731 - DNA, 75 bp, synthetic construct
  source 1..75: mol_type = other DNA
ggcggaggtggctccggaggcggaggcagcggcggaggtgggtctggcggaggcgggtgcggcggaggtggctcc

SEQ ID NO: 1732 - DNA, 609 bp, synthetic construct
  source 1..609: mol_type = other DNA
aattccgcccctctcccccccccccctctccctcccccccccctaacgttactggccgaagccgcttggaataaggccggtgtgcgtttgtctatatgttattttccaccatattgccgtcttttggcaatgtgagggcccggaaacctggccctgtcttcttgacgagcattcctaggggtctttcccctctcgccaaaggaatgcaaggtctgttgaatgtcgtgaaggaagcagttcctctggaagcttcttgaagacaaacaacgtctgtagcgaccctttgcaggcagcggaaccccccacctggcgacaggtgcctctgcggccaaaagccacgtgtataagatacacctgcaaaggcggcacaaccccagtgccacgttgtgagttggatagttgtggaaagagtcaaatggctctcctcaagcgtattcaacaaggggctgaaggatgcccagaaggtaccccattgtatgggatctgatctggggcctcggtgcacatgctttacatgtgtttagtcgaggttaaaaaaacgtctaggccccccgaaccacggggacgtggttttcctttgaaaaacacgatgataatatggccacaacc

SEQ ID NO: 1733 - DNA, 623 bp, synthetic construct
  source 1..623: mol_type = other DNA
taacgaattccgcccctctcccccccccccctctccctcccccccccctaacgttactggccgaagccgcttggaataaggccggtgtgcgtttgtctatatgttattttccaccatattgccgtcttttggcaatgtgagggcccggaaacctggccctgtcttcttgacgagcattcctaggggtctttcccctctcgccaaaggaatgcaaggtctgttgaatgtcgtgaaggaagcagttcctctggaagcttcttgaagacaaacaacgtctgtagcgaccctttgcaggcagcggaaccccccacctggcgacaggtgcctctgcggccaaaagccacgtgtataagatacacctgcaaaggcggcacaaccccagtgccacgttgtgagttggatagttgtggaaagagtcaaatggctctcctcaagcgtattcaacaaggggctgaaggatgcccagaaggtaccccattgtatgggatctgatctggggcctcggtgcacatgctttacatgtgtttagtcgaggttaaaaaaacgtctaggccccccgaaccacggggacgtggttttcctttgaaaaacacgatgataatatggccacaaccgccgccacc

SEQ ID NO: 1734 - DNA, 54 bp, synthetic construct
  source 1..54: mol_type = other DNA
gtggagaggaagtgctgcgtggagtgcccaccatgccctgcccctcctgtggcc

SEQ ID NO: 1735 - DNA, 108 bp, synthetic construct
  source 1..108: mol_type = other DNA
gagctcaaaaccccacttggtgacacaactcacacatgcccacggtgcccagagcccaaatcttgtgacacacctcccccgtgcccacggtgcccagcacctgaactc

SEQ ID NO: 1736 - DNA, 153 bp, synthetic construct
  source 1..153: mol_type = other DNA
gagctcaaaaccccacttggtgacacaactcacacatgcccacggtgcccagagcccaaatcttgtgacacacctcccccgtgcccacggtgcccagagcccaaatcttgtgacacacctcccccatgcccacggtgcccagcacctgaactc

SEQ ID NO: 1737 - DNA, 198 bp, synthetic construct
  source 1..198: mol_type = other DNA
gagctcaaaaccccacttggtgacacaactcacacatgcccacggtgcccagagcccaaatcttgtgacacacctcccccgtgcccacggtgcccagagcccaaatcttgtgacacacctcccccatgcccacggtgcccagagcccaaatcttgtgacacacctcccccgtgcccaaggtgcccagcacctgaactc

SEQ ID NO: 1738 - DNA, 45 bp, synthetic construct
  source 1..45: mol_type = other DNA
gtgcccagggattgtggttgtaagccttgcatatgtacagtccca

SEQ ID NO: 1739 - DNA, 18 bp, synthetic construct
  source 1..18: mol_type = other DNA
gtgcccagggattgtggt

SEQ ID NO: 1740 - protein, 536 aa, Homo sapiens
MEFSSPSREECPKPLSRVSIMAGSLTGLLLLQAVSWASGARPCIPKSFGYSSVVCVCNATYCDSFDPPTFPALGTFSRYESTRSGRRMELSMGPIQANHTGTGLLLTLQPEQKFQKVKGFGGAMTDAAALNILALSPPAQNLLLKSYFSEEGIGYNIIRVPMASCDFSIRTYTYADTPDDFQLHNFSLPEEDTKLKIPLIHRALQLAQRPVSLLASPWTSPTWLKTNGAVNGKGSLKGQPGDIYHQTWARYFVKFLDAYAEHKLQFWAVTAENEPSAGLLSGYPFQCLGFTPEHQRDFIARDLGPTLANSTHHNVRLLMLDDQRLLLPHWAKVVLTDPEAAKYVHGIAVHWYLDFLAPAKATLGETHRLFPNTMLFASEACVGSKFWEQSVRLGSWDRGMQYSHSIITNLLYHVVGWTDWNLALNPEGGPNWVRNFVDSPIIVDITKDTFYKQPMFYHLGHFSKFIPEGSQRVGLVASQKNDLDAVALMHPDGSAVVVVLNRSSKDVPLTIKDPAVGFLETISPGYSIHTYLWRRQ

SEQ ID NO: 1741 - DNA, 2291 bp, Homo sapiens
  source 1..2291: mol_type = genomic DNA
ggaattacttgcagggctaacctagtgcctatagctaaggcaggtacctgcatccttgtttttgtttagtggatcctctatccttcagagactctggaacccctgtggtcttctcttcatctaatgaccctgaggggatggagttttcaagtccttccagagaggaatgtcccaagcctttgagtagggtaagcatcatggctggcagcctcacaggattgcttctacttcaggcagtgtcgtgggcatcaggtgcccgcccctgcatccctaaaagcttcggctacagctcggtggtgtgtgtctgcaatgccacatactgtgactcctttgaccccccgacctttcctgcccttggtaccttcagccgctatgagagtacacgcagtgggcgacggatggagctgagtatggggcccatccaggctaatcacacgggcacaggcctgctactgaccctgcagccagaacagaagttccagaaagtgaagggatttggaggggccatgacagatgctgctgctctcaacatccttgccctgtcaccccctgcccaaaatttgctacttaaatcgtacttctctgaagaaggaatcggatataacatcatccgggtacccatggccagctgtgacttctccatccgcacctacacctatgcagacacccctgatgatttccagttgcacaacttcagcctcccagaggaagataccaagctcaagatacccctgattcaccgagccctgcagttggcccagcgtcccgtttcactccttgccagcccctggacatcacccacttggctcaagaccaatggagcggtgaatgggaaggggtcactcaagggacagcccggagacatctaccaccagacctgggccagatactttgtgaagttcctggatgcctatgctgagcacaagttacagttctgggcagtgacagctgaaaatgagccttctgctgggctgttgagtggataccccttccagtgcctgggcttcacccctgaacatcagcgagacttcattgcccgtgacctaggtcctaccctcgccaacagtactcaccacaatgtccgcctactcatgctggatgaccaacgcttgctgctgccccactgggcaaaggtggtactgacagacccagaagcagctaaatatgttcatggcattgctgtacattggtacctggactttctggctccagccaaagccaccctaggggagacacaccgcctgttccccaacaccatgctctttgcctcagaggcctgtgtgggctccaagttctgggagcagagtgtgcggctaggctcctgggatcgagggatgcagtacagccacagcatcatcacgaacctcctgtaccatgtggtcggctggaccgactggaaccttgccctgaaccccgaaggaggacccaattgggtgcgtaactttgtcgacagtcccatcattgtagacatcaccaaggacacgttttacaaacagcccatgttctaccaccttggccacttcagcaagttcattcctgagggctcccagagagtggggctggttgccagtcagaagaacgacctggacgcagtggcactgatgcatcccgatggctctgctgttgtggtcgtgctaaaccgctcctctaaggatgtgcctcttaccatcaaggatcctgctgtgggcttcctggagacaatctcacctggctactccattcacacctacctgtggcgtcgccagtgatggagcagatactcaaggaggcactgggctcagcctgggcattaaagggacagagtcagctcacacgctgtctgtgactaaagagggcacagcagggccagtgtgagcttacagcgacgtaagcccaggggcaatggtttgggtgactcactttcccctctaggtggtgccaggggctggaggcccctagaaaaagatcagtaagccccagtgtccccccagcccccatgcttatgtgaacatgcgctgtgtgctgcttgctttggaaactgggcctgggtccaggcctagggtgagctcactgtccgtacaaacacaagatcagggctgagggtaaggaaaagaagagactaggaaagctgggcccaaaactggagactgtttgtctttcctggagatgcagaactgggcccgtggagcagcagtgtcagcatcagggcggaagccttaaagcagcagcgggtgtgcccaggcacccagatgattcctatggcaccagccaggaaaaatggcagctcttaaaggagaaaatgtttgagccca

SEQ ID NO: 1742 - protein, 536 aa, Homo sapiens; identical to SEQ ID NO: 1740

SEQ ID NO: 1743 - DNA, 2344 bp, Homo sapiens
  source 1..2344: mol_type = genomic DNA
atcctgccttcagagtcttactgcgcggggccccagtctccagtcccgcccaggcgcctttgcaggctgcggtgggatttcgttttgcctccggttggggctgctgtttctcttcgccgacgtggatcctctatccttcagagactctggaacccctgtggtcttctcttcatctaatgaccctgaggggatggagttttcaagtccttccagagaggaatgtcccaagcctttgagtagggtaagcatcatggctggcagcctcacaggattgcttctacttcaggcagtgtcgtgggcatcaggtgcccgcccctgcatccctaaaagcttcggctacagctcggtggtgtgtgtctgcaatgccacatactgtgactcctttgaccccccgacctttcctgcccttggtaccttcagccgctatgagagtacacgcagtgggcgacggatggagctgagtatggggcccatccaggctaatcacacgggcacaggcctgctactgaccctgcagccagaacagaagttccagaaagtgaagggatttggaggggccatgacagatgctgctgctctcaacatccttgccctgtcaccccctgcccaaaatttgctacttaaatcgtacttctctgaagaaggaatcggatataacatcatccgggtacccatggccagctgtgacttctccatccgcacctacacctatgcagacacccctgatgatttccagttgcacaacttcagcctcccagaggaagataccaagctcaagatacccctgattcaccgagccctgcagttggcccagcgtcccgtttcactccttgccagcccctggacatcacccacttggctcaagaccaatggagcggtgaatgggaaggggtcactcaagggacagcccggagacatctaccaccagacctgggccagatactttgtgaagttcctggatgcctatgctgagcacaagttacagttctgggcagtgacagctgaaaatgagccttctgctgggctgttgagtggataccccttccagtgcctgggcttcacccctgaacatcagcgagacttcattgcccgtgacctaggtcctaccctcgccaacagtactcaccacaatgtccgcctactcatgctggatgaccaacgcttgctgctgccccactgggcaaaggtggtactgacagacccagaagcagctaaatatgttcatggcattgctgtacattggtacctggactttctggctccagccaaagccaccctaggggagacacaccgcctgttccccaacaccatgctctttgcctcagaggcctgtgtgggctccaagttctgggagcagagtgtgcggctaggctcctgggatcgagggatgcagtacagccacagcatcatcacgaacctcctgtaccatgtggtcggctggaccgactggaaccttgccctgaaccccgaaggaggacccaattgggtgcgtaactttgtcgacagtcccatcattgtagacatcaccaaggacacgttttacaaacagcccatgttctaccaccttggccacttcagcaagttcattcctgagggctcccagagagtggggctggttgccagtcagaagaacgacctggacgcagtggcactgatgcatcccgatggctctgctgttgtggtcgtgctaaaccgctcctctaaggatgtgcctcttaccatcaaggatcctgctgtgggcttcctggagacaatctcacctggctactccattcacacctacctgtggcgtcgccagtgatggagcagatactcaaggaggcactgggctcagcctgggcattaaagggacagagtcagctcacacgctgtctgtgactaaagagggcacagcagggccagtgtgagcttacagcgacgtaagcccaggggcaatggtttgggtgactcactttcccctctaggtggtgccaggggctggaggcccctagaaaaagatcagtaagccccagtgtccccccagcccccatgcttatgtgaacatgcgctgtgtgctgcttgctttggaaactgggcctgggtccaggcctagggtgagctcactgtccgtacaaacacaagatcagggctgagggtaaggaaaagaagagactaggaaagctgggcccaaaactggagactgtttgtctttcctggagatgcagaactgggcccgtggagcagcagtgtcagcatcagggcggaagccttaaagcagcagcgggtgtgcccaggcacccagatgattcctatggcaccagccaggaaaaatggcagctcttaaaggagaaaatgtttgagccca

SEQ ID NO: 1744 - protein, 536 aa, Homo sapiens; identical to SEQ ID NO: 1740

SEQ ID NO: 1745 - DNA, 2325 bp, Homo sapiens
  source 1..2325: mol_type = genomic DNA
atcctgccttcagagtcttactgcgcggggccccagtctccagtcccgcccaggcgcctttgcaggctgcggtgggatttcgttttgcctccggttggggctgctgtttctcttcgccgacgagactctggaacccctgtggtcttctcttcatctaatgaccctgaggggatggagttttcaagtccttccagagaggaatgtcccaagcctttgagtagggtaagcatcatggctggcagcctcacaggattgcttctacttcaggcagtgtcgtgggcatcaggtgcccgcccctgcatccctaaaagcttcggctacagctcggtggtgtgtgtctgcaatgccacatactgtgactcctttgaccccccgacctttcctgcccttggtaccttcagccgctatgagagtacacgcagtgggcgacggatggagctgagtatggggcccatccaggctaatcacacgggcacaggcctgctactgaccctgcagccagaacagaagttccagaaagtgaagggatttggaggggccatgacagatgctgctgctctcaacatccttgccctgtcaccccctgcccaaaatttgctacttaaatcgtacttctctgaagaaggaatcggatataacatcatccgggtacccatggccagctgtgacttctccatccgcacctacacctatgcagacacccctgatgatttccagttgcacaacttcagcctcccagaggaagataccaagctcaagatacccctgattcaccgagccctgcagttggcccagcgtcccgtttcactccttgccagcccctggacatcacccacttggctcaagaccaatggagcggtgaatgggaaggggtcactcaagggacagcccggagacatctaccaccagacctgggccagatactttgtgaagttcctggatgcctatgctgagcacaagttacagttctgggcagtgacagctgaaaatgagccttctgctgggctgttgagtggataccccttccagtgcctgggcttcacccctgaacatcagcgagacttcattgcccgtgacctaggtcctaccctcgccaacagtactcaccacaatgtccgcctactcatgctggatgaccaacgcttgctgctgccccactgggcaaaggtggtactgacagacccagaagcagctaaatatgttcatggcattgctgtacattggtacctggactttctggctccagccaaagccaccctaggggagacacaccgcctgttccccaacaccatgctctttgcctcagaggcctgtgtgggctccaagttctgggagcagagtgtgcggctaggctcctgggatcgagggatgcagtacagccacagcatcatcacgaacctcctgtaccatgtggtcggctggaccgactggaaccttgccctgaaccccgaaggaggacccaattgggtgcgtaactttgtcgacagtcccatcattgtagacatcaccaaggacacgttttacaaacagcccatgttctaccaccttggccacttcagcaagttcattcctgagggctcccagagagtggggctggttgccagtcagaagaacgacctggacgcagtggcactgatgcatcccgatggctctgctgttgtggtcgtgctaaaccgctcctctaaggatgtgcctcttaccatcaaggatcctgctgtgggcttcctggagacaatctcacctggctactccattcacacctacctgtggcgtcgccagtgatggagcagatactcaaggaggcactgggctcagcctgggcattaaagggacagagtcagctcacacgctgtctgtgactaaagagggcacagcagggccagtgtgagcttacagcgacgtaagcccaggggcaatggtttgggtgactcactttcccctctaggtggtgccaggggctggaggcccctagaaaaagatcagtaagccccagtgtccccccagcccccatgcttatgtgaacatgcgctgtgtgctgcttgctttggaaactgggcctgggtccaggcctagggtgagctcactgtccgtacaaacacaagatcagggctgagggtaaggaaaagaagagactaggaaagctgggcccaaaactggagactgtttgtctttcctggagatgcagaactgggcccgtggagcagcagtgtcagcatcagggcggaagccttaaagcagcagcgggtgtgcccaggcacccagatgattcctatggcaccagccaggaaaaatggcagctcttaaaggagaaaatgtttgagccca

SEQ ID NO: 1746 - protein, 449 aa, Homo sapiens
MELSMGPIQANHTGTGLLLTLQPEQKFQKVKGFGGAMTDAAALNILALSPPAQNLLLKSYFSEEGIGYNIIRVPMASCDFSIRTYTYADTPDDFQLHNFSLPEEDTKLKIPLIHRALQLAQRPVSLLASPWTSPTWLKTNGAVNGKGSLKGQPGDIYHQTWARYFVKFLDAYAEHKLQFWAVTAENEPSAGLLSGYPFQCLGFTPEHQRDFIARDLGPTLANSTHHNVRLLMLDDQRLLLPHWAKVVLTDPEAAKYVHGIAVHWYLDFLAPAKATLGETHRLFPNTMLFASEACVGSKFWEQSVRLGSWDRGMQYSHSIITNLLYHVVGWTDWNLALNPEGGPNWVRNFVDSPIIVDITKDTFYKQPMFYHLGHFSKFIPEGSQRVGLVASQKNDLDAVALMHPDGSAVVVVLNRSSKDVPLTIKDPAVGFLETISPGYSIHTYLWRRQ

SEQ ID NO: 1747 - DNA, 2161 bp, Homo sapiens
  source 1..2161: mol_type = genomic DNA
atcctgccttcagagtcttactgcgcggggccccagtctccagtcccgcccaggcgcctttgcaggctgcggtgggatttcgttttgcctccggttggggctgctgtttctcttcgccgacggtgcccgcccctgcatccctaaaagcttcggctacagctcggtggtgtgtgtctgcaatgccacatactgtgactcctttgaccccccgacctttcctgcccttggtaccttcagccgctatgagagtacacgcagtgggcgacggatggagctgagtatggggcccatccaggctaatcacacgggcacaggcctgctactgaccctgcagccagaacagaagttccagaaagtgaagggatttggaggggccatgacagatgctgctgctctcaacatccttgccctgtcaccccctgcccaaaatttgctacttaaatcgtacttctctgaagaaggaatcggatataacatcatccgggtacccatggccagctgtgacttctccatccgcacctacacctatgcagacacccctgatgatttccagttgcacaacttcagcctcccagaggaagataccaagctcaagatacccctgattcaccgagccctgcagttggcccagcgtcccgtttcactccttgccagcccctggacatcacccacttggctcaagaccaatggagcggtgaatgggaaggggtcactcaagggacagcccggagacatctaccaccagacctgggccagatactttgtgaagttcctggatgcctatgctgagcacaagttacagttctgggcagtgacagctgaaaatgagccttctgctgggctgttgagtggataccccttccagtgcctgggcttcacccctgaacatcagcgagacttcattgcccgtgacctaggtcctaccctcgccaacagtactcaccacaatgtccgcctactcatgctggatgaccaacgcttgctgctgccccactgggcaaaggtggtactgacagacccagaagcagctaaatatgttcatggcattgctgtacattggtacctggactttctggctccagccaaagccaccctaggggagacacaccgcctgttccccaacaccatgctctttgcctcagaggcctgtgtgggctccaagttctgggagcagagtgtgcggctaggctcctgggatcgagggatgcagtacagccacagcatcatcacgaacctcctgtaccatgtggtcggctggaccgactggaaccttgccctgaaccccgaaggaggacccaattgggtgcgtaactttgtcgacagtcccatcattgtagacatcaccaaggacacgttttacaaacagcccatgttctaccaccttggccacttcagcaagttcattcctgagggctcccagagagtggggctggttgccagtcagaagaacgacctggacgcagtggcactgatgcatcccgatggctctgctgttgtggtcgtgctaaaccgctcctctaaggatgtgcctcttaccatcaaggatcctgctgtgggcttcctggagacaatctcacctggctactccattcacacctacctgtggcgtcgccagtgatggagcagatactcaaggaggcactgggctcagcctgggcattaaagggacagagtcagctcacacgctgtctgtgactaaagagggcacagcagggccagtgtgagcttacagcgacgtaagcccaggggcaatggtttgggtgactcactttcccctctaggtggtgccaggggctggaggcccctagaaaaagatcagtaagccccagtgtccccccagcccccatgcttatgtgaacatgcgctgtgtgctgcttgctttggaaactgggcctgggtccaggcctagggtgagctcactgtccgtacaaacacaagatcagggctgagggtaaggaaaagaagagactaggaaagctgggcccaaaactggagactgtttgtctttcctggagatgcagaactgggcccgtggagcagcagtgtcagcatcagggcggaagccttaaagcagcagcgggtgtgcccaggcacccagatgattcctatggcaccagccaggaaaaatggcagctcttaaaggagaaaatgtttgagccca

SEQ ID NO: 1748 - protein, 487 aa, Homo sapiens
MEFSSPSREECPKPLSRVSIMAGSLTGLLLLQAVSWASGARPCIPKSFGYSSVVCVCNATYCDSFDPPTFPALGTFSRYESTRSGRRMELSMGPIQANHTGTGIGYNIIRVPMASCDFSIRTYTYADTPDDFQLHNFSLPEEDTKLKIPLIHRALQLAQRPVSLLASPWTSPTWLKTNGAVNGKGSLKGQPGDIYHQTWARYFVKFLDAYAEHKLQFWAVTAENEPSAGLLSGYPFQCLGFTPEHQRDFIARDLGPTLANSTHHNVRLLMLDDQRLLLPHWAKVVLTDPEAAKYVHGIAVHWYLDFLAPAKATLGETHRLFPNTMLFASEACVGSKFWEQSVRLGSWDRGMQYSHSIITNLLYHVVGWTDWNLALNPEGGPNWVRNFVDSPIIVDITKDTFYKQPMFYHLGHFSKFIPEGSQRVGLVASQKNDLDAVALMHPDGSAVVVVLNRSSKDVPLTIKDPAVGFLETISPGYSIHTYLWRRQ

SEQ ID NO: 1749 - DNA, 2144 bp, Homo sapiens
  source 1..2144: mol_type = genomic DNA
ggaattacttgcagggctaacctagtgcctatagctaaggcaggtacctgcatccttgtttttgtttagtggatcctctatccttcagagactctggaacccctgtggtcttctcttcatctaatgaccctgaggggatggagttttcaagtccttccagagaggaatgtcccaagcctttgagtagggtaagcatcatggctggcagcctcacaggattgcttctacttcaggcagtgtcgtgggcatcaggtgcccgcccctgcatccctaaaagcttcggctacagctcggtggtgtgtgtctgcaatgccacatactgtgactcctttgaccccccgacctttcctgcccttggtaccttcagccgctatgagagtacacgcagtgggcgacggatggagctgagtatggggcccatccaggctaatcacacgggcacaggaatcggatataacatcatccgggtacccatggccagctgtgacttctccatccgcacctacacctatgcagacacccctgatgatttccagttgcacaacttcagcctcccagaggaagataccaagctcaagatacccctgattcaccgagccctgcagttggcccagcgtcccgtttcactccttgccagcccctggacatcacccacttggctcaagaccaatggagcggtgaatgggaaggggtcactcaagggacagcccggagacatctaccaccagacctgggccagatactttgtgaagttcctggatgcctatgctgagcacaagttacagttctgggcagtgacagctgaaaatgagccttctgctgggctgttgagtggataccccttccagtgcctgggcttcacccctgaacatcagcgagacttcattgcccgtgacctaggtcctaccctcgccaacagtactcaccacaatgtccgcctactcatgctggatgaccaacgcttgctgctgccccactgggcaaaggtggtactgacagacccagaagcagctaaatatgttcatggcattgctgtacattggtacctggactttctggctccagccaaagccaccctaggggagacacaccgcctgttccccaacaccatgctctttgcctcagaggcctgtgtgggctccaagttctgggagcagagtgtgcggctaggctcctgggatcgagggatgcagtacagccacagcatcatcacgaacctcctgtaccatgtggtcggctggaccgactggaaccttgccctgaaccccgaaggaggacccaattgggtgcgtaactttgtcgacagtcccatcattgtagacatcaccaaggacacgttttacaaacagcccatgttctaccaccttggccacttcagcaagttcattcctgagggctcccagagagtggggctggttgccagtcagaagaacgacctggacgcagtggcactgatgcatcccgatggctctgctgttgtggtcgtgctaaaccgctcctctaaggatgtgcctcttaccatcaaggatcctgctgtgggcttcctggagacaatctcacctggctactccattcacacctacctgtggcgtcgccagtgatggagcagatactcaaggaggcactgggctcagcctgggcattaaagggacagagtcagctcacacgctgtctgtgactaaagagggcacagcagggccagtgtgagcttacagcgacgtaagcccaggggcaatggtttgggtgactcactttcccctctaggtggtgccaggggctggaggcccctagaaaaagatcagtaagccccagtgtccccccagcccccatgcttatgtgaacatgcgctgtgtgctgcttgctttggaaactgggcctgggtccaggcctagggtgagctcactgtccgtacaaacacaagatcagggctgagggtaaggaaaagaagagactaggaaagctgggcccaaaactggagactgtttgtctttcctggagatgcagaactgggcccgtggagcagcagtgtcagcatcagggcggaagccttaaagcagcagcgggtgtgcccaggcacccagatgattcctatggcaccagccaggaaaaatggcagctcttaaaggagaaaatgtttgagccca

SEQ ID NO: 1750 - protein, 524 aa, Homo sapiens
MYALFLLASLLGAALAGPVLGLKECTRGSAVWCQNVKTASDCGAVKHCLQTVWNKPTVKSLPCDICKDVVTAAGDMLKDNATEEEILVYLEKTCDWLPKPNMSASCKEIVDSYLPVILDIIKGEMSRPGEVCSALNLCESLQKHLAELNHQKQLESNKIPELDMTEVVAPFMANIPLLLYPQDGPRSKPQPKDNGDVCQDCIQMVTDIQTAVRTNSTFVQALVEHVKEECDRLGPGMADICKNYISQYSEIAIQMMMHMQPKEICALVGFCDEVKEMPMQTLVPAKVASKNVIPALELVEPIKKHEVPAKSDVYCEVCEFLVKEVTKLIDNNKTEKEILDAFDKMCSKLPKSLSEECQEVVDTYGSSILSILLEEVSPELVCSMLHLCSGTRLPALTVHVTQPKDGGFCEVCKKLVGYLDRNLEKNSTKQEILAALEKGCSFLPDPYQKQCDQFVAEYEPVLIEILVEVMDPSFVCLKIGACPSAHKPLLGTEKCIWGPSYWCQNTETAAQCNAVEHCKRHVWN

SEQ ID NO: 1751 - DNA, 2748 bp, Homo sapiens
  source 1..2748: mol_type = genomic DNA
gcattgcagactgcggagtcagacggcgctatgtacgccctcttcctcctggccagcctcctgggcgcggctctagccggcccggtccttggactgaaagaatgcaccaggggctcggcagtgtggtgccagaatgtgaagacggcgtccgactgcggggcagtgaagcactgcctgcagaccgtttggaacaagccaacagtgaaatcccttccctgcgacatatgcaaagacgttgtcaccgcagctggtgatatgctgaaggacaatgccactgaggaggagatccttgtttacttggagaagacctgtgactggcttccgaaaccgaacatgtctgcttcatgcaaggagatagtggactcctacctccctgtcatcctggacatcattaaaggagaaatgagccgtcctggggaggtgtgctctgctctcaacctctgcgagtctctccagaagcacctagcagagctgaatcaccagaagcagctggagtccaataagatcccagagctggacatgactgaggtggtggcccccttcatggccaacatccctctcctcctctaccctcaggacggcccccgcagcaagccccagccaaaggataatggggacgtttgccaggactgcattcagatggtgactgacatccagactgctgtacggaccaactccacctttgtccaggccttggtggaacatgtcaaggaggagtgtgaccgcctgggccctggcatggccgacatatgcaagaactatatcagccagtattctgaaattgctatccagatgatgatgcacatgcaacccaaggagatctgtgcgctggttgggttctgtgatgaggtgaaagagatgcccatgcagactctggtccccgccaaagtggcctccaagaatgtcatccctgccctggaactggtggagcccattaagaagcacgaggtcccagcaaagtctgatgtttactgtgaggtgtgtgaattcctggtgaaggaggtgaccaagctgattgacaacaacaagactgagaaagaaatactcgacgcttttgacaaaatgtgctcgaagctgccgaagtccctgtcggaagagtgccaggaggtggtggacacgtacggcagctccatcctgtccatcctgctggaggaggtcagccctgagctggtgtgcagcatgctgcacctctgctctggcacgcggctgcctgcactgaccgttcacgtgactcagccaaaggacggtggcttctgcgaagtgtgcaagaagctggtgggttatttggatcgcaacctggagaaaaacagcaccaagcaggagatcctggctgctcttgagaaaggctgcagcttcctgccagacccttaccagaagcagtgtgatcagtttgtggcagagtacgagcccgtgctgatcgagatcctggtggaggtgatggatccttccttcgtgtgcttgaaaattggagcctgcccctcggcccataagcccttgttgggaactgagaagtgtatatggggcccaagctactggtgccagaacacagagacagcagcccagtgcaatgctgtcgagcattgcaaacgccatgtgtggaactaggaggaggaatattccatcttggcagaaaccacagcattggtttttttctacttgtgtgtctgggggaatgaacgcacagatctgtttgactttgttataaaaatagggctcccccacctcccccatttctgtgtcctttattgtagcattgctgtctgcaagggagcccctagcccctggcagacatagctgcttcagtgccccttttctctctgctagatggatgttgatgcactggaggtcttttagcctgcccttgcatggcgcctgctggaggaggagagagctctgctggcatgagccacagtttcttgactggaggccatcaaccctcttggttgaggccttgttctgagccctgacatgtgcttgggcactggtgggcctgggcttctgaggtggcctcctgccctgatcagggaccctccccgctttcctgggcctctcagttgaacaaagcagcaaaacaaaggcagttttatatgaaagattagaagcctggaataatcaggctttttaaatgatgtaattcccactgtaatagcatagggattttggaagcagctgctggtggcttgggacatcagtggggccaagggttctctgtccctggttcaactgtgatttggctttcccgtgtctttcctggtgatgccttgtttggggttctgtgggtttgggtgggaagagggccatctgcctgaatgtaacctgctagctctccgaaggccctgcgggcctggcttgtgtgagcgtgtggacagtggtggccgcgctgtgcctgctcgtgttgcctacatgtccctggctgttgaggcgctgcttcagcctgcacccctcccttgtctcatagatgctccttttgaccttttcaaataaatatggatggcgagctcctaggcctctggcttcctggtagagggcggcatgccgaagggtctgctgggtgtggattggatgctggggtgtgggggttggaagctgtctgtggcccacttgggcacccacgcttctgtccacttctggttgccaggagacagcaagcaaagccagcaggacatgaagttgctattaaatggacttcgtgatttttgttttgcactaaagtttctgtgatttaacaataaaattctgttagccaga

SEQ ID NO: 1752 - protein, 527 aa, Homo sapiens
MYALFLLASLLGAALAGPVLGLKECTRGSAVWCQNVKTASDCGAVKHCLQTVWNKPTVKSLPCDICKDVVTAAGDMLKDNATEEEILVYLEKTCDWLPKPNMSASCKEIVDSYLPVILDIIKGEMSRPGEVCSALNLCESLQKHLAELNHQKQLESNKIPELDMTEVVAPFMANIPLLLYPQDGPRSKPQPKDNGDVCQDCIQMVTDIQTAVRTNSTFVQALVEHVKEECDRLGPGMADICKNYISQYSEIAIQMMMHMQDQQPKEICALVGFCDEVKEMPMQTLVPAKVASKNVIPALELVEPIKKHEVPAKSDVYCEVCEFLVKEVTKLIDNNKTEKEILDAFDKMCSKLPKSLSEECQEVVDTYGSSILSILLEEVSPELVCSMLHLCSGTRLPALTVHVTQPKDGGFCEVCKKLVGYLDRNLEKNSTKQEILAALEKGCSFLPDPYQKQCDQFVAEYEPVLIEILVEVMDPSFVCLKIGACPSAHKPLLGTEKCIWGPSYWCQNTETAAQCNAVEHCKRHVWN

SEQ ID NO: 1753 - DNA, 2757 bp, Homo sapiens
  source 1..2757: mol_type = genomic DNA
gcattgcagactgcggagtcagacggcgctatgtacgccctcttcctcctggccagcctcctgggcgcggctctagccggcccggtccttggactgaaagaatgcaccaggggctcggcagtgtggtgccagaatgtgaagacggcgtccgactgcggggcagtgaagcactgcctgcagaccgtttggaacaagccaacagtgaaatcccttccctgcgacatatgcaaagacgttgtcaccgcagctggtgatatgctgaaggacaatgccactgaggaggagatccttgtttacttggagaagacctgtgactggcttccgaaaccgaacatgtctgcttcatgcaaggagatagtggactcctacctccctgtcatcctggacatcattaaaggagaaatgagccgtcctggggaggtgtgctctgctctcaacctctgcgagtctctccagaagcacctagcagagctgaatcaccagaagcagctggagtccaataagatcccagagctggacatgactgaggtggtggcccccttcatggccaacatccctctcctcctctaccctcaggacggcccccgcagcaagccccagccaaaggataatggggacgtttgccaggactgcattcagatggtgactgacatccagactgctgtacggaccaactccacctttgtccaggccttggtggaacatgtcaaggaggagtgtgaccgcctgggccctggcatggccgacatatgcaagaactatatcagccagtattctgaaattgctatccagatgatgatgcacatgcaggatcagcaacccaaggagatctgtgcgctggttgggttctgtgatgaggtgaaagagatgcccatgcagactctggtccccgccaaagtggcctccaagaatgtcatccctgccctggaactggtggagcccattaagaagcacgaggtcccagcaaagtctgatgtttactgtgaggtgtgtgaattcctggtgaaggaggtgaccaagctgattgacaacaacaagactgagaaagaaatactcgacgcttttgacaaaatgtgctcgaagctgccgaagtccctgtcggaagagtgccaggaggtggtggacacgtacggcagctccatcctgtccatcctgctggaggaggtcagccctgagctggtgtgcagcatgctgcacctctgctctggcacgcggctgcctgcactgaccgttcacgtgactcagccaaaggacggtggcttctgcgaagtgtgcaagaagctggtgggttatttggatcgcaacctggagaaaaacagcaccaagcaggagatcctggctgctcttgagaaaggctgcagcttcctgccagacccttaccagaagcagtgtgatcagtttgtggcagagtacgagcccgtgctgatcgagatcctggtggaggtgatggatccttccttcgtgtgcttgaaaattggagcctgcccctcggcccataagcccttgttgggaactgagaagtgtatatggggcccaagctactggtgccagaacacagagacagcagcccagtgcaatgctgtcgagcattgcaaacgccatgtgtggaactaggaggaggaatattccatcttggcagaaaccacagcattggtttttttctacttgtgtgtctgggggaatgaacgcacagatctgtttgactttgttataaaaatagggctcccccacctcccccatttctgtgtcctttattgtagcattgctgtctgcaagggagcccctagcccctggcagacatagctgcttcagtgccccttttctctctgctagatggatgttgatgcactggaggtcttttagcctgcccttgcatggcgcctgctggaggaggagagagctctgctggcatgagccacagtttcttgactggaggccatcaaccctcttggttgaggccttgttctgagccctgacatgtgcttgggcactggtgggcctgggcttctgaggtggcctcctgccctgatcagggaccctccccgctttcctgggcctctcagttgaacaaagcagcaaaacaaaggcagttttatatgaaagattagaagcctggaataatcaggctttttaaatgatgtaattcccactgtaatagcatagggattttggaagcagctgctggtggcttgggacatcagtggggccaagggttctctgtccctggttcaactgtgatttggctttcccgtgtctttcctggtgatgccttgtttggggttctgtgggtttgggtgggaagagggccatctgcctgaatgtaacctgctagctctccgaaggccctgcgggcctggcttgtgtgagcgtgtggacagtggtggccgcgctgtgcctgctcgtgttgcctacatgtccctggctgttgaggcgctgcttcagcctgcacccctcccttgtctcatagatgctccttttgaccttttcaaataaatatggatggcgagctcctaggcctctggcttcctggtagagggcggcatgccgaagggtctgctgggtgtggattggatgctggggtgtgggggttggaagctgtctgtggcccacttgggcacccacgcttctgtccacttctggttgccaggagacagcaagcaaagccagcaggacatgaagttgctattaaatggacttcgtgatttttgttttgcactaaagtttctgtgatttaacaataaaattctgttagccaga

SEQ ID NO: 1754 - protein, 526 aa, Homo sapiens
MYALFLLASLLGAALAGPVLGLKECTRGSAVWCQNVKTASDCGAVKHCLQTVWNKPTVKSLPCDICKDVVTAAGDMLKDNATEEEILVYLEKTCDWLPKPNMSASCKEIVDSYLPVILDIIKGEMSRPGEVCSALNLCESLQKHLAELNHQKQLESNKIPELDMTEVVAPFMANIPLLLYPQDGPRSKPQPKDNGDVCQDCIQMVTDIQTAVRTNSTFVQALVEHVKEECDRLGPGMADICKNYISQYSEIAIQMMMHMDQQPKEICALVGFCDEVKEMPMQTLVPAKVASKNVIPALELVEPIKKHEVPAKSDVYCEVCEFLVKEVTKLIDNNKTEKEILDAFDKMCSKLPKSLSEECQEVVDTYGSSILSILLEEVSPELVCSMLHLCSGTRLPALTVHVTQPKDGGFCEVCKKLVGYLDRNLEKNSTKQEILAALEKGCSFLPDPYQKQCDQFVAEYEPVLIEILVEVMDPSFVCLKIGACPSAHKPLLGTEKCIWGPSYWCQNTETAAQCNAVEHCKRHVWN

SEQ ID NO: 1755 - DNA, 2754 bp, Homo sapiens
  source 1..2754: mol_type = genomic DNA
gcattgcagactgcggagtcagacggcgctatgtacgccctcttcctcctggccagcctcctgggcgcggctctagccggcccggtccttggactgaaagaatgcaccaggggctcggcagtgtggtgccagaatgtgaagacggcgtccgactgcggggcagtgaagcactgcctgcagaccgtttggaacaagccaacagtgaaatcccttccctgcgacatatgcaaagacgttgtcaccgcagctggtgatatgctgaaggacaatgccactgaggaggagatccttgtttacttggagaagacctgtgactggcttccgaaaccgaacatgtctgcttcatgcaaggagatagtggactcctacctccctgtcatcctggacatcattaaaggagaaatgagccgtcctggggaggtgtgctctgctctcaacctctgcgagtctctccagaagcacctagcagagctgaatcaccagaagcagctggagtccaataagatcccagagctggacatgactgaggtggtggcccccttcatggccaacatccctctcctcctctaccctcaggacggcccccgcagcaagccccagccaaaggataatggggacgtttgccaggactgcattcagatggtgactgacatccagactgctgtacggaccaactccacctttgtccaggccttggtggaacatgtcaaggaggagtgtgaccgcctgggccctggcatggccgacatatgcaagaactatatcagccagtattctgaaattgctatccagatgatgatgcacatggatcagcaacccaaggagatctgtgcgctggttgggttctgtgatgaggtgaaagagatgcccatgcagactctggtccccgccaaagtggcctccaagaatgtcatccctgccctggaactggtggagcccattaagaagcacgaggtcccagcaaagtctgatgtttactgtgaggtgtgtgaattcctggtgaaggaggtgaccaagctgattgacaacaacaagactgagaaagaaatactcgacgcttttgacaaaatgtgctcgaagctgccgaagtccctgtcggaagagtgccaggaggtggtggacacgtacggcagctccatcctgtccatcctgctggaggaggtcagccctgagctggtgtgcagcatgctgcacctctgctctggcacgcggctgcctgcactgaccgttcacgtgactcagccaaaggacggtggcttctgcgaagtgtgcaagaagctggtgggttatttggatcgcaacctggagaaaaacagcaccaagcaggagatcctggctgctcttgagaaaggctgcagcttcctgccagacccttaccagaagcagtgtgatcagtttgtggcagagtacgagcccgtgctgatcgagatcctggtggaggtgatggatccttccttcgtgtgcttgaaaattggagcctgcccctcggcccataagcccttgttgggaactgagaagtgtatatggggcccaagctactggtgccagaacacagagacagcagcccagtgcaatgctgtcgagcattgcaaacgccatgtgtggaactaggaggaggaatattccatcttggcagaaaccacagcattggtttttttctacttgtgtgtctgggggaatgaacgcacagatctgtttgactttgttataaaaatagggctcccccacctcccccatttctgtgtcctttattgtagcattgctgtctgcaagggagcccctagcccctggcagacatagctgcttcagtgccccttttctctctgctagatggatgttgatgcactggaggtcttttagcctgcccttgcatggcgcctgctggaggaggagagagctctgctggcatgagccacagtttcttgactggaggccatcaaccctcttggttgaggccttgttctgagccctgacatgtgcttgggcactggtgggcctgggcttctgaggtggcctcctgccctgatcagggaccctccccgctttcctgggcctctcagttgaacaaagcagcaaaacaaaggcagttttatatgaaagattagaagcctggaataatcaggctttttaaatgatgtaattcccactgtaatagcatagggattttggaagcagctgctggtggcttgggacatcagtggggccaagggttctctgtccctggttcaactgtgatttggctttcccgtgtctttcctggtgatgccttgtttggggttctgtgggtttgggtgggaagagggccatctgcctgaatgtaacctgctagctctccgaaggccctgcgggcctggcttgtgtgagcgtgtggacagtggtggccgcgctgtgcctgctcgtgttgcctacatgtccctggctgttgaggcgctgcttcagcctgcacccctcccttgtctcatagatgctccttttgaccttttcaaataaatatggatggcgagctcctaggcctctggcttcctggtagagggcggcatgccgaagggtctgctgggtgtggattggatgctggggtgtgggggttggaagctgtctgtggcccacttgggcacccacgcttctgtccacttctggttgccaggagacagcaagcaaagccagcaggacatgaagttgctattaaatggacttcgtgatttttgttttgcactaaagtttctgtgatttaacaataaaattctgttagccaga

SEQ ID NO: 1756 - protein, 81 aa, Homo sapiens
SLPCDICKDVVTAAGDMLKDNATEEEILVYLEKTCDWLPKPNMSASCKEIVDSYLPVILDIIKGEMSRPGEVCSALNLCES

SEQ ID NO: 1757 - protein, 81 aa, Homo sapiens
GDVCQDCIQMVTDIQTAVRTNSTFVQALVEHVKEECDRLGPGMADICKNYISQYSEIAIQMMMHMQPKEICALVGFCDEVK

SEQ ID NO: 1758 - protein, 80 aa, Homo sapiens
SDVYCEVCEFLVKEVTKLIDNNKTEKEILDAFDKMCSKLPKSLSEECQEVVDTYGSSILSILLEEVSPELVCSMLHLCSG

SEQ ID NO: 1759 - DNA, 3413 bp, synthetic construct
  source 1..3413: mol_type = other DNA
ctgcgcgctcgctcgctcactgaggccgcccgggcaaagcccgggcgtcgggcgacctttggtcgcccggcctcagtgagcgagcgagcgcgcagagagggagtggccaactccatcactaggggttccttgtagttaatgattaacccgccatgctacttatctaccagggtaatggggatcctctagaactatagctagtcgacattgattattgactagttattaatagtaatcaattacggggtcattagttcatagcccatatatggagttccgcgttacataacttacggtaaatggcccgcctggctgaccgcccaacgacccccgcccattgacgtcaataatgacgtatgttcccatagtaacgccaatagggactttccattgacgtcaatgggtggagtatttacggtaaactgcccacttggcagtacatcaagtgtatcatatgccaagtacgccccctattgacgtcaatgacggtaaatggcccgcctggcattatgcccagtacatgaccttatgggactttcctacttggcagtacatctacgtattagtcatcgctattaccatgtcgaggccacgttctgcttcactctccccatctcccccccctccccacccccaattttgtatttatttattttttaattattttgtgcagcgatgggggcggggggggggggcgcgcgccaggcggggcggggcggggcgaggggcggggcggggcgaggcggagaggtgcggcggcagccaatcagagcggcgcgctccgaaagtttccttttatggcgaggcggcggcggcggcggccctataaaaagcgaagcgcgcggcgggcgggagcaagcttcgtttagtgaaccgtcagatcgcctggagacgccatccacgctgttttgacctccatagaagacaccgggaccgatccagcctccgcggattcgaatcccggccgggaacggtgcattggaacgcggattccccgtgccaagagtgacgtaagtaccgcctatagagtctataggcccacaaaaaatgctttcttcttttaatatacttttttgtttatcttatttctaatactttccctaatctctttctttcagggcaataatgatacaatgtatcatgcctctttgcaccattctaaagaataacagtgataatttctgggttaaggcaatagcaatatttctgcatataaatatttctgcatataaattgtaactgatgtaagaggtttcatattgctaatagcagctacaatccagctaccattctgcttttattttatggttgggataaggctggattattctgagtccaagctaggcccttttgctaatcatgttcatacctcttatcttcctcccacagctcctgggcaacgtgctggtctgtgtgctggcccatcactttggcaaagaattgggattcgaaccggtgccgccaccatggaattcagcagccccagcagagaggaatgccccaagcctctgagccgggtgtcaatcatggccggatctctgacaggactgctgctgcttcaggccgtgtcttgggcttctggcgctagaccttgcatccccaagagcttcggctacagcagcgtcgtgtgcgtgtgcaatgccacctactgcgacagcttcgaccctcctacctttcctgctctgggcaccttcagcagatacgagagcaccagatccggcagacggatggaactgagcatgggacccatccaggccaatcacacaggcactggcctgctgctgacactgcagcctgagcagaaattccagaaagtgaaaggcttcggcggagccatgacagatgccgccgctctgaatatcctggctctgtctccaccagctcagaacctgctgctcaagagctacttcagcgaggaaggcatcggctacaacatcatcagagtgcccatggccagctgcgacttcagcatcaggacctacacctacgccgacacacccgacgatttccagctgcacaacttcagcctgcctgaagaggacaccaagctgaagatccctctgatccacagagccctgcagctggcacaaagacccgtgtcactgctggcctctccatggacatctcccacctggctgaaaacaaatggcgccgtgaatggcaagggcagcctgaaaggccaacctggcgacatctaccaccagacctgggccagatacttcgtgaagttcctggacgcctatgccgagcacaagctgcagttttgggccgtgacagccgagaacgaaccttctgctggactgctgagcggctacccctttcagtgcctgggctttacacccgagcaccagcgggactttatcgcccgtgatctgggacccacactggccaatagcacccaccataatgtgcggctgctgatgctggacgaccagagactgcttctgccccactgggctaaagtggtgctgacagatcctgaggccgccaaatacgtgcacggaatcgccgtgcactggtatctggactttctggcccctgccaaggccacactgggagagacacacagactgttccccaacaccatgctgttcgccagcgaagcctgtgtgggcagcaagttttgggaacagagcgtgcggctcggcagctgggatagaggcatgcagtacagccacagcatcatcaccaacctgctgtaccacgtcgtcggctggaccgactggaatctggccctgaatcctgaaggcggccctaactgggtccgaaacttcgtggacagccccatcatcgtggacatcaccaaggacaccttctacaagcagcccatgttctaccacctgggacacttcagcaagttcatccccgagggctctcagcgcgttggactggtggcttcccagaagaacgatctggacgccgtggctctgatgcaccctgatggatctgctgtggtggtggtcctgaaccgcagcagcaaagatgtgcccctgaccatcaaggatcccgccgtgggattcctggaaacaatcagccctggctactccatccacacctacctgtggcgtagacagtagtaactcgaggacggggtgaactacgcctgaggatccgatctttttccctctgccaaaaattatggggacatcatgaagccccttgagcatctgacttctggctaataaaggaaatttattttcattgcaatagtgtgttggaattttttgtgtctctcactcggcctaggtagataagtagcatggcgggttaatcattaactacaaggaacccctagtgatggagttggccactccctctctgcgcgctcgctcgctcactgaggccgggcgaccaaaggtcgcccgacgcccgggctttgcccgggcggcctcagtgagcgagcgagcgcgcag

SEQ ID NO: 1760 - DNA, 3428 bp, synthetic construct
  source 1..3428: mol_type = other DNA
ctgcgcgctcgctcgctcactgaggccgcccgggcaaagcccgggcgtcgggcgacctttggtcgcccggcctcagtgagcgagcgagcgcgcagagagggagtggccaactccatcactaggggttccttgtagttaatgattaacccgccatgctacttatctaccagggtaatggggatcctctagaactatagctagtcgacattgattattgactagttattaatagtaatcaattacggggtcattagttcatagcccatatatggagttccgcgttacataacttacggtaaatggcccgcctggctgaccgcccaacgacccccgcccattgacgtcaataatgacgtatgttcccatagtaacgccaatagggactttccattgacgtcaatgggtggagtatttacggtaaactgcccacttggcagtacatcaagtgtatcatatgccaagtacgccccctattgacgtcaatgacggtaaatggcccgcctggcattatgcccagtacatgaccttatgggactttcctacttggcagtacatctacgtattagtcatcgctattaccatgtcgaggccacgttctgcttcactctccccatctcccccccctccccacccccaattttgtatttatttattttttaattattttgtgcagcgatgggggcggggggggggggcgcgcgccaggcggggcggggcggggcgaggggcggggcggggcgaggcggagaggtgcggcggcagccaatcagagcggcgcgctccgaaagtttccttttatggcgaggcggcggcggcggcggccctataaaaagcgaagcgcgcggcgggcgggagcaagcttcgtttagtgaaccgtcagatcgcctggagacgccatccacgctgttttgacctccatagaagacaccgggaccgatccagcctccgcggattcgaatcccggccgggaacggtgcattggaacgcggattccccgtgccaagagtgacgtaagtaccgcctatagagtctataggcccacaaaaaatgctttcttcttttaatatacttttttgtttatcttatttctaatactttccctaatctctttctttcagggcaataatgatacaatgtatcatgcctctttgcaccattctaaagaataacagtgataatttctgggttaaggcaatagcaatatttctgcatataaatatttctgcatataaattgtaactgatgtaagaggtttcatattgctaatagcagctacaatccagctaccattctgcttttattttatggttgggataaggctggattattctgagtccaagctaggcccttttgctaatcatgttcatacctcttatcttcctcccacagctcctgggcaacgtgctggtctgtgtgctggcccatcactttggcaaagaattgggattcgaaccggtgccgccaccatggaattcagcagccccagcagagaggaatgccccaagcctctgagccgggtgtcaatcatggccggatctctgacaggactgctgctgcttcaggccgtgtcttgggcttctggcgctagaccttgcatccccaagagcttcggctacagcagcgtcgtgtgcgtgtgcaatgccacctactgcgacagcttcgaccctcctacctttcctgctctgggcaccttcagcagatacgagagcaccagatccggcagacggatggaactgagcatgggacccatccaggccaatcacacaggcactggcctgctgctgacactgcagcctgagcagaaattccagaaagtgaaaggcttcggcggagccatgacagatgccgccgctctgaatatcctggctctgtctccaccagctcagaacctgctgctcaagagctacttcagcgaggaaggcatcggctacaacatcatcagagtgcccatggccagctgcgacttcagcatcaggacctacacctacgccgacacacccgacgatttccagctgcacaacttcagcctgcctgaagaggacaccaagctgaagatccctctgatccacagagccctgcagctggcacaaagacccgtgtcactgctggcctctccatggacatctcccacctggctgaaaacaaatggcgccgtgaatggcaagggcagcctgaaaggccaacctggcgacatctaccaccagacctgggccagatacttcgtgaagttcctggacgcctatgccgagcacaagctgcagttttgggccgtgacagccgagaacgaaccttctgctggactgctgagcggctacccctttcagtgcctgggctttacacccgagcaccagcgggactttatcgcccgtgatctgggacccacactggccaatagcacccaccataatgtgcggctgctgatgctggacgaccagagactgcttctgccccactgggctaaagtggtgctgacagatcctgaggccgccaaatacgtgcacggaatcgccgtgcactggtatctggactttctggcccctgccaaggccacactgggagagacacacagactgttccccaacaccatgctgttcgccagcgaagcctgtgtgggcagcaagttttgggaacagagcgtgcggctcggcagctgggatagaggcatgcagtacagccacagcatcatcaccaacctgctgtaccacgtcgtcggctggaccgactggaatctggccctgaatcctgaaggcggccctaactgggtccgaaacttcgtggacagccccatcatcgtggacatcaccaaggacaccttctacaagcagcccatgttctaccacctgggacacttcagcaagttcatccccgagggctctcagcgcgttggactggtggcttcccagaagaacgatctggacgccgtggctctgatgcaccctgatggatctgctgtggtggtggtcctgaaccgcagcagcaaagatgtgcccctgaccatcaaggatcccgccgtgggattcctggaaacaatcagccctggctactccatccacacctacctgtggcgtagacagaagtttgaaagacagtagtaactcgaggacggggtgaactacgcctgaggatccgatctttttccctctgccaaaaattatggggacatcatgaagccccttgagcatctgacttctggctaataaaggaaatttattttcattgcaatagtgtgttggaattttttgtgtctctcactcggcctaggtagataagtagcatggcgggttaatcattaactacaaggaacccctagtgatggagttggccactccctctctgcgcgctcgctcgctcactgaggccgggcgaccaaaggtcgcccgacgcccgggctttgcccgggcggcctcagtgagcgagcgagcgcgcag

SEQ ID NO: 1761 - DNA, 3476 bp, synthetic construct
  source 1..3476: mol_type = other DNA
ctgcgcgctcgctcgctcactgaggccgcccgggcaaagcccgggcgtcgggcgacctttggtcgcccggcctcagtgagcgagcgagcgcgcagagagggagtggccaactccatcactaggggttccttgtagttaatgattaacccgccatgctacttatctaccagggtaatggggatcctctagaactatagctagtcgacattgattattgactagttattaatagtaatcaattacggggtcattagttcatagcccatatatggagttccgcgttacataacttacggtaaatggcccgcctggctgaccgcccaacgacccccgcccattgacgtcaataatgacgtatgttcccatagtaacgccaatagggactttccattgacgtcaatgggtggagtatttacggtaaactgcccacttggcagtacatcaagtgtatcatatgccaagtacgccccctattgacgtcaatgacggtaaatggcccgcctggcattatgcccagtacatgaccttatgggactttcctacttggcagtacatctacgtattagtcatcgctattaccatgtcgaggccacgttctgcttcactctccccatctcccccccctccccacccccaattttgtatttatttattttttaattattttgtgcagcgatgggggcggggggggggggcgcgcgccaggcggggcggggcggggcgaggggcggggcggggcgaggcggagaggtgcggcggcagccaatcagagcggcgcgctccgaaagtttccttttatggcgaggcggcggcggcggcggccctataaaaagcgaagcgcgcggcgggcgggagcaagcttcgtttagtgaaccgtcagatcgcctggagacgccatccacgctgttttgacctccatagaagacaccgggaccgatccagcctccgcggattcgaatcccggccgggaacggtgcattggaacgcggattccccgtgccaagagtgacgtaagtaccgcctatagagtctataggcccacaaaaaatgctttcttcttttaatatacttttttgtttatcttatttctaatactttccctaatctctttctttcagggcaataatgatacaatgtatcatgcctctttgcaccattctaaagaataacagtgataatttctgggttaaggcaatagcaatatttctgcatataaatatttctgcatataaattgtaactgatgtaagaggtttcatattgctaatagcagctacaatccagctaccattctgcttttattttatggttgggataaggctggattattctgagtccaagctaggcccttttgctaatcatgttcatacctcttatcttcctcccacagctcctgggcaacgtgctggtctgtgtgctggcccatcactttggcaaagaattgggattcgaaccggtgccgccaccatggaattcagcagccccagcagagaggaatgccccaagcctctgagccgggtgtcaatcatggccggatctctgacaggactgctgctgcttcaggccgtgtcttgggcttctggcatgaaggagaccgctgctgcaaagttcgagagacagcatatggatagctccacaagcgccgcagctagaccttgcatccccaagagcttcggctacagcagcgtcgtgtgcgtgtgcaatgccacctactgcgacagcttcgaccctcctacctttcctgctctgggcaccttcagcagatacgagagcaccagatccggcagacggatggaactgagcatgggacccatccaggccaatcacacaggcactggcctgctgctgacactgcagcctgagcagaaattccagaaagtgaaaggcttcggcggagccatgacagatgccgccgctctgaatatcctggctctgtctccaccagctcagaacctgctgctcaagagctacttcagcgaggaaggcatcggctacaacatcatcagagtgcccatggccagctgcgacttcagcatcaggacctacacctacgccgacacacccgacgatttccagctgcacaacttcagcctgcctgaagaggacaccaagctgaagatccctctgatccacagagccctgcagctggcacaaagacccgtgtcactgctggcctctccatggacatctcccacctggctgaaaacaaatggcgccgtgaatggcaagggcagcctgaaaggccaacctggcgacatctaccaccagacctgggccagatacttcgtgaagttcctggacgcctatgccgagcacaagctgcagttttgggccgtgacagccgagaacgaaccttctgctggactgctgagcggctacccctttcagtgcctgggctttacacccgagcaccagcgggactttatcgcccgtgatctgggacccacactggccaatagcacccaccataatgtgcggctgctgatgctggacgaccagagactgcttctgccccactgggctaaagtggtgctgacagatcctgaggccgccaaatacgtgcacggaatcgccgtgcactggtatctggactttctggcccctgccaaggccacactgggagagacacacagactgttccccaacaccatgctgttcgccagcgaagcctgtgtgggcagcaagttttgggaacagagcgtgcggctcggcagctgggatagaggcatgcagtacagccacagcatcatcaccaacctgctgtaccacgtcgtcggctggaccgactggaatctggccctgaatcctgaaggcggccctaactgggtccgaaacttcgtggacagccccatcatcgtggacatcaccaaggacaccttctacaagcagcccatgttctaccacctgggacacttcagcaagttcatccccgagggctctcagcgcgttggactggtggcttcccagaagaacgatctggacgccgtggctctgatgcaccctgatggatctgctgtggtggtggtcctgaaccgcagcagcaaagatgtgcccctgaccatcaaggatcccgccgtgggattcctggaaacaatcagccctggctactccatccacacctacctgtggcgtagacagtagtaactcgaggacggggtgaactacgcctgaggatccgatctttttccctctgccaaaaattatggggacatcatgaagccccttgagcatctgacttctggctaataaaggaaatttattttcattgcaatagtgtgttggaattttttgtgtctctcactcggcctaggtagataagtagcatggcgggttaatcattaactacaaggaacccctagtgatggagttggccactccctctctgcgcgctcgctcgctcactgaggccgggcgaccaaaggtcgcccgacgcccgggctttgcccgggcggcctcagtgagcgagcgagcgcgcag

SEQ ID NO: 1762 - DNA, 3428 bp, synthetic construct
  source 1..3428: mol_type = other DNA
ctgcgcgctcgctcgctcactgaggccgcccgggcaaagcccgggcgtcgggcgacctttggtcgcccggcctcagtgagcgagcgagcgcgcagagagggagtggccaactccatcactaggggttccttgtagttaatgattaacccgccatgctacttatctaccagggtaatggggatcctctagaactatagctagtcgacattgattattgactagttattaatagtaatcaattacggggtcattagttcatagcccatatatggagttccgcgttacataacttacggtaaatggcccgcctggctgaccgcccaacgacccccgcccattgacgtcaataatgacgtatgttcccatagtaacgccaatagggactttccattgacgtcaatgggtggagtatttacggtaaactgcccacttggcagtacatcaagtgtatcatatgccaagtacgccccctattgacgtcaatgacggtaaatggcccgcctggcattatgcccagtacatgaccttatgggactttcctacttggcagtacatctacgtattagtcatcgctattaccatgtcgaggccacgttctgcttcactctccccatctcccccccctccccacccccaattttgtatttatttattttttaattattttgtgcagcgatgggggcggggggggggggcgcgcgccaggcggggcggggcggggcgaggggcggggcggggcgaggcggagaggtgcggcggcagccaatcagagcggcgcgctccgaaagtttccttttatggcgaggcggcggcggcggcggccctataaaaagcgaagcgcgcggcgggcgggagcaagcttcgtttagtgaaccgtcagatcgcctggagacgccatccacgctgttttgacctccatagaagacaccgggaccgatccagcctccgcggattcgaatcccggccgggaacggtgcattggaacgcggattccccgtgccaagagtgacgtaagtaccgcctatagagtctataggcccacaaaaaatgctttcttcttttaatatacttttttgtttatcttatttctaatactttccctaatctctttctttcagggcaataatgatacaatgtatcatgcctctttgcaccattctaaagaataacagtgataatttctgggttaaggcaatagcaatatttctgcatataaatatttctgcatataaattgtaactgatgtaagaggtttcatattgctaatagcagctacaatccagctaccattctgcttttattttatggttgggataaggctggattattctgagtccaagctaggcccttttgctaatcatgttcatacctcttatcttcctcccacagctcctgggcaacgtgctggtctgtgtgctggcccatcactttggcaaagaattgggattcgaaccggtgccgccaccatggaattcagcagccccagcagagaggaatgccccaagcctctgagccgggtgtcaatcatggccggatctctgacaggactgctgctgcttcaggccgtgtcttgggcttctggcgctagaccttgcatccccaagagcttcggctacagcagcgtcgtgtgcgtgtgcaatgccacctactgcgacagcttcgaccctcctacctttcctgctctgggcaccttcagcagatacgagagcaccagatccggcagacggatggaactgagcatgggacccatccaggccaatcacacaggcactggcctgctgctgacactgcagcctgagcagaaattccagaaagtgaaaggcttcggcggagccatgacagatgccgccgctctgaatatcctggctctgtctccaccagctcagaacctgctgctcaagagctacttcagcgaggaaggcatcggctacaacatcatcagagtgcccatggccagctgcgacttcagcatcaggacctacacctacgccgacacacccgacgatttccagctgcacaacttcagcctgcctgaagaggacaccaagctgaagatccctctgatccacagagccctgcagctggcacaaagacccgtgtcactgctggcctctccatggacatctcccacctggctgaaaacaaatggcgccgtgaatggcaagggcagcctgaaaggccaacctggcgacatctaccaccagacctgggccagatacttcgtgaagttcctggacgcctatgccgagcacaagctgcagttttgggccgtgacagccgagaacgaaccttctgctggactgctgagcggctacccctttcagtgcctgggctttacacccgagcaccagcgggactttatcgcccgtgatctgggacccacactggccaatagcacccaccataatgtgcggctgctgatgctggacgaccagagactgcttctgccccactgggctaaagtggtgctgacagatcctgaggccgccaaatacgtgcacggaatcgccgtgcactggtatctggactttctggcccctgccaaggccacactgggagagacacacagactgttccccaacaccatgctgttcgccagcgaagcctgtgtgggcagcaagttttgggaacagagcgtgcggctcggcagctgggatagaggcatgcagtacagccacagcatcatcaccaacctgctgtaccacgtcgtcggctggaccgactggaatctggccctgaatcctgaaggcggccctaactgggtccgaaacttcgtggacagccccatcatcgtggacatcaccaaggacaccttctacaagcagcccatgttctaccacctgggacacttcagcaagttcatccccgagggctctcagcgcgttggactggtggcttcccagaagaacgatctggacgccgtggctctgatgcaccctgatggatctgctgtggtggtggtcctgaaccgcagcagcaaagatgtgcccctgaccatcaaggatcccgccgtgggattcctggaaacaatcagccctggctactccatccacacctacctgtggcgtagacagcagaaaatcctggattagtaactcgaggacggggtgaactacgcctgaggatccgatctttttccctctgccaaaaattatggggacatcatgaagccccttgagcatctgacttctggctaataaaggaaatttattttcattgcaatagtgtgttggaattttttgtgtctctcactcggcctaggtagataagtagcatggcgggttaatcattaactacaaggaacccctagtgatggagttggccactccctctctgcgcgctcgctcgctcactgaggccgggcgaccaaaggtcgcccgacgcccgggctttgcccgggcggcctcagtgagcgagcgagcgcgcag

SEQ ID NO: 1763 - DNA, 3428 bp, synthetic construct
  source 1..3428: mol_type = other DNA
ctgcgcgctcgctcgctcactgaggccgcccgggcaaagcccgggcgtcgggcgacctttggtcgcccggcctcagtgagcgagcgagcgcgcagagagggagtggccaactccatcactaggggttccttgtagttaatgattaacccgccatgctacttatctaccagggtaatggggatcctctagaactatagctagtcgacattgattattgactagttattaatagtaatcaattacggggtcattagttcatagcccatatatggagttccgcgttacataacttacggtaaatggcccgcctggctgaccgcccaacgacccccgcccattgacgtcaataatgacgtatgttcccatagtaacgccaatagggactttccattgacgtcaatgggtggagtatttacggtaaactgcccacttggcagtacatcaagtgtatcatatgccaagtacgccccctattgacgtcaatgacggtaaatggcccgcctggcattatgcccagtacatgaccttatgggactttcctacttggcagtacatctacgtattagtcatcgctattaccatgtcgaggccacgttctgcttcactctccccatctcccccccctccccacccccaattttgtatttatttattttttaattattttgtgcagcgatgggggcggggggggggggcgcgcgccaggcggggcggggcggggcgaggggcggggcggggcgaggcggagaggtgcggcggcagccaatcagagcggcgcgctccgaaagtttccttttatggcgaggcggcggcggcggcggccctataaaaagcgaagcgcgcggcgggcgggagcaagcttcgtttagtgaaccgtcagatcgcctggagacgccatccacgctgttttgacctccatagaagacaccgggaccgatccagcctccgcggattcgaatcccggccgggaacggtgcattggaacgcggattccccgtgccaagagtgacgtaagtaccgcctatagagtctataggcccacaaaaaatgctttcttcttttaatatacttttttgtttatcttatttctaatactttccctaatctctttctttcagggcaataatgatacaatgtatcatgcctctttgcaccattctaaagaataacagtgataatttctgggttaaggcaatagcaatatttctgcatataaatatttctgcatataaattgtaactgatgtaagaggtttcatattgctaatagcagctacaatccagctaccattctgcttttattttatggttgggataaggctggattattctgagtccaagctaggcccttttgctaatcatgttcatacctcttatcttcctcccacagctcctgggcaacgtgctggtctgtgtgctggcccatcactttggcaaagaattgggattcgaaccggtgccgccaccatggaattcagcagccccagcagagaggaatgccccaagcctctgagccgggtgtcaatcatggccggatctctgacaggactgctgctgcttcaggccgtgtcttgggcttctggcgctagaccttgcatccccaagagcttcggctacagcagcgtcgtgtgcgtgtgcaatgccacctactgcgacagcttcgaccctcctacctttcctgctctgggcaccttcagcagatacgagagcaccagatccggcagacggatggaactgagcatgggacccatccaggccaatcacacaggcactggcctgctgctgacactgcagcctgagcagaaattccagaaagtgaaaggcttcggcggagccatgacagatgccgccgctctgaatatcctggctctgtctccaccagctcagaacctgctgctcaagagctacttcagcgaggaaggcatcggctacaacatcatcagagtgcccatggccagctgcgacttcagcatcaggacctacacctacgccgacacacccgacgatttccagctgcacaacttcagcctgcctgaagaggacaccaagctgaagatccctctgatccacagagccctgcagctggcacaaagacccgtgtcactgctggcctctccatggacatctcccacctggctgaaaacaaatggcgccgtgaatggcaagggcagcctgaaaggccaacctggcgacatctaccaccagacctgggccagatacttcgtgaagttcctggacgcctatgccgagcacaagctgcagttttgggccgtgacagccgagaacgaaccttctgctggactgctgagcggctacccctttcagtgcctgggctttacacccgagcaccagcgggactttatcgcccgtgatctgggacccacactggccaatagcacccaccataatgtgcggctgctgatgctggacgaccagagactgcttctgccccactgggctaaagtggtgctgacagatcctgaggccgccaaatacgtgcacggaatcgccgtgcactggtatctggactttctggcccctgccaaggccacactgggagagacacacagactgttccccaacaccatgctgttcgccagcgaagcctgtgtgggcagcaagttttgggaacagagcgtgcggctcggcagctgggatagaggcatgcagtacagccacagcatcatcaccaacctgctgtaccacgtcgtcggctggaccgactggaatctggccctgaatcctgaaggcggccctaactgggtccgaaacttcgtggacagccccatcatcgtggacatcaccaaggacaccttctacaagcagcccatgttctaccacctgggacacttcagcaagttcatccccgagggctctcagcgcgttggactggtggcttcccagaagaacgatctggacgccgtggctctgatgcaccctgatggatctgctgtggtggtggtcctgaaccgcagcagcaaagatgtgcccctgaccatcaaggatcccgccgtgggattcctggaaacaatcagccctggctactccatccacacctacctgtggcgtagacagcagagattcttcgagtagtaactcgaggacggggtgaactacgcctgaggatccgatctttttccctctgccaaaaattatggggacatcatgaagccccttgagcatctgacttctggctaataaaggaaatttattttcattgcaatagtgtgttggaattttttgtgtctctcactcggcctaggtagataagtagcatggcgggttaatcattaactacaaggaacccctagtgatggagttggccactccctctctgcgcgctcgctcgctcactgaggccgggcgaccaaaggtcgcccgacgcccgggctttgcccgggcggcctcagtgagcgagcgagcgcgcag

SEQ ID NO: 1764 - DNA, 3512 bp, synthetic construct
  source 1..3512: mol_type = other DNA
ctgcgcgctcgctcgctcactgaggccgcccgggcaaagcccgggcgtcgggcgacctttggtcgcccggcctcagtgagcgagcgagcgcgcagagagggagtggccaactccatcactaggggttccttgtagttaatgattaacccgccatgctacttatctaccagggtaatggggatcctctagaactatagctagtcgacattgattattgactagttattaatagtaatcaattacggggtcattagttcatagcccatatatggagttccgcgttacataacttacggtaaatggcccgcctggctgaccgcccaacgacccccgcccattgacgtcaataatgacgtatgttcccatagtaacgccaatagggactttccattgacgtcaatgggtggagtatttacggtaaactgcccacttggcagtacatcaagtgtatcatatgccaagtacgccccctattgacgtcaatgacggtaaatggcccgcctggcattatgcccagtacatgaccttatgggactttcctacttggcagtacatctacgtattagtcatcgctattaccatgtcgaggccacgttctgcttcactctccccatctcccccccctccccacccccaattttgtatttatttattttttaattattttgtgcagcgatgggggcggggggggggggcgcgcgccaggcggggcggggcggggcgaggggcggggcggggcgaggcggagaggtgcggcggcagccaatcagagcggcgcgctccgaaagtttccttttatggcgaggcggcggcggcggcggccctataaaaagcgaagcgcgcggcgggcgggagcaagcttcgtttagtgaaccgtcagatcgcctggagacgccatccacgctgttttgacctccatagaagacaccgggaccgatccagcctccgcggattcgaatcccggccgggaacggtgcattggaacgcggattccccgtgccaagagtgacgtaagtaccgcctatagagtctataggcccacaaaaaatgctttcttcttttaatatacttttttgtttatcttatttctaatactttccctaatctctttctttcagggcaataatgatacaatgtatcatgcctctttgcaccattctaaagaataacagtgataatttctgggttaaggcaatagcaatatttctgcatataaatatttctgcatataaattgtaactgatgtaagaggtttcatattgctaatagcagctacaatccagctaccattctgcttttattttatggttgggataaggctggattattctgagtccaagctaggcccttttgctaatcatgttcatacctcttatcttcctcccacagctcctgggcaacgtgctggtctgtgtgctggcccatcactttggcaaagaattgggattcgaaccggtgccgccaccatggaattcagcagccccagcagagaggaatgccccaagcctctgagccgggtgtcaatcatggccggatctctgacaggactgctgctgcttcaggccgtgtcttgggcttctggcgctagaccttgcatccccaagagcttcggctacagcagcgtcgtgtgcgtgtgcaatgccacctactgcgacagcttcgaccctcctacctttcctgctctgggcaccttcagcagatacgagagcaccagatccggcagacggatggaactgagcatgggacccatccaggccaatcacacaggcactggcctgctgctgacactgcagcctgagcagaaattccagaaagtgaaaggcttcggcggagccatgacagatgccgccgctctgaatatcctggctctgtctccaccagctcagaacctgctgctcaagagctacttcagcgaggaaggcatcggctacaacatcatcagagtgcccatggccagctgcgacttcagcatcaggacctacacctacgccgacacacccgacgatttccagctgcacaacttcagcctgcctgaagaggacaccaagctgaagatccctctgatccacagagccctgcagctggcacaaagacccgtgtcactgctggcctctccatggacatctcccacctggctgaaaacaaatggcgccgtgaatggcaagggcagcctgaaaggccaacctggcgacatctaccaccagacctgggccagatacttcgtgaagttcctggacgcctatgccgagcacaagctgcagttttgggccgtgacagccgagaacgaaccttctgctggactgctgagcggctacccctttcagtgcctgggctttacacccgagcaccagcgggactttatcgcccgtgatctgggacccacactggccaatagcacccaccataatgtgcggctgctgatgctggacgaccagagactgcttctgccccactgggctaaagtggtgctgacagatcctgaggccgccaaatacgtgcacggaatcgccgtgcactggtatctggactttctggcccctgccaaggccacactgggagagacacacagactgttccccaacaccatgctgttcgccagcgaagcctgtgtgggcagcaagttttgggaacagagcgtgcggctcggcagctgggatagaggcatgcagtacagccacagcatcatcaccaacctgctgtaccacgtcgtcggctggaccgactggaatctggccctgaatcctgaaggcggccctaactgggtccgaaacttcgtggacagccccatcatcgtggacatcaccaaggacaccttctacaagcagcccatgttctaccacctgggacacttcagcaagttcatccccgagggctctcagcgcgttggactggtggcttcccagaagaacgatctggacgccgtggctctgatgcaccctgatggatctgctgtggtggtggtcctgaaccgcagcagcaaagatgtgcccctgaccatcaaggatcccgccgtgggattcctggaaacaatcagccctggctactccatccacacctacctgtggcgtagacagggaggggggggttcgggtggcggcggaagtgggggcggtggttctctacggaagctgcggaagcggctactgctgcggaaacttcggaaacggctactgtagtaactcgaggacggggtgaactacgcctgaggatccgatctttttccctctgccaaaaattatggggacatcatgaagccccttgagcatctgacttctggctaataaaggaaatttattttcattgcaatagtgtgttggaattttttgtgtctctcactcggcctaggtagataagtagcatggcgggttaatcattaactacaaggaacccctagtgatggagttggccactccctctctgcgcgctcgctcgctcactgaggccgggcgaccaaaggtcgcccgacgcccgggctttgcccgggcggcctcagtgagcgagcgagcgcgcag

SEQ ID NO: 1765 - DNA, 3500 bp, synthetic construct
  source 1..3500: mol_type = other DNA
ctgcgcgctcgctcgctcactgaggccgcccgggcaaagcccgggcgtcgggcgacctttggtcgcccggcctcagtgagcgagcgagcgcgcagagagggagtggccaactccatcactaggggttccttgtagttaatgattaacccgccatgctacttatctaccagggtaatggggatcctctagaactatagctagtcgacattgattattgactagttattaatagtaatcaattacggggtcattagttcatagcccatatatggagttccgcgttacataacttacggtaaatggcccgcctggctgaccgcccaacgacccccgcccattgacgtcaataatgacgtatgttcccatagtaacgccaatagggactttccattgacgtcaatgggtggagtatttacggtaaactgcccacttggcagtacatcaagtgtatcatatgccaagtacgccccctattgacgtcaatgacggtaaatggcccgcctggcattatgcccagtacatgaccttatgggactttcctacttggcagtacatctacgtattagtcatcgctattaccatgtcgaggccacgttctgcttcactctccccatctcccccccctccccacccccaattttgtatttatttattttttaattattttgtgcagcgatgggggcggggggggggggcgcgcgccaggcggggcggggcggggcgaggggcggggcggggcgaggcggagaggtgcggcggcagccaatcagagcggcgcgctccgaaagtttccttttatggcgaggcggcggcggcggcggccctataaaaagcgaagcgcgcggcgggcgggagcaagcttcgtttagtgaaccgtcagatcgcctggagacgccatccacgctgttttgacctccatagaagacaccgggaccgatccagcctccgcggattcgaatcccggccgggaacggtgcattggaacgcggattccccgtgccaagagtgacgtaagtaccgcctatagagtctataggcccacaaaaaatgctttcttcttttaatatacttttttgtttatcttatttctaatactttccctaatctctttctttcagggcaataatgatacaatgtatcatgcctctttgcaccattctaaagaataacagtgataatttctgggttaaggcaatagcaatatttctgcatataaatatttctgcatataaattgtaactgatgtaagaggtttcatattgctaatagcagctacaatccagctaccattctgcttttattttatggttgggataaggctggattattctgagtccaagctaggcccttttgctaatcatgttcatacctcttatcttcctcccacagctcctgggcaacgtgctggtctgtgtgctggcccatcactttggcaaagaattgggattcgaaccggtgccgccaccatggaattcagcagccccagcagagaggaatgccccaagcctctgagccgggtgtcaatcatggccggatctctgacaggactgctgctgcttcaggccgtgtcttgggcttctggcgctagaccttgcatccccaagagcttcggctacagcagcgtcgtgtgcgtgtgcaatgccacctactgcgacagcttcgaccctcctacctttcctgctctgggcaccttcagcagatacgagagcaccagatccggcagacggatggaactgagcatgggacccatccaggccaatcacacaggcactggcctgctgctgacactgcagcctgagcagaaattccagaaagtgaaaggcttcggcggagccatgacagatgccgccgctctgaatatcctggctctgtctccaccagctcagaacctgctgctcaagagctacttcagcgaggaaggcatcggctacaacatcatcagagtgcccatggccagctgcgacttcagcatcaggacctacacctacgccgacacacccgacgatttccagctgcacaacttcagcctgcctgaagaggacaccaagctgaagatccctctgatccacagagccctgcagctggcacaaagacccgtgtcactgctggcctctccatggacatctcccacctggctgaaaacaaatggcgccgtgaatggcaagggcagcctgaaaggccaacctggcgacatctaccaccagacctgggccagatacttcgtgaagttcctggacgcctatgccgagcacaagctgcagttttgggccgtgacagccgagaacgaaccttctgctggactgctgagcggctacccctttcagtgcctgggctttacacccgagcaccagcgggactttatcgcccgtgatctgggacccacactggccaatagcacccaccataatgtgcggctgctgatgctggacgaccagagactgcttctgccccactgggctaaagtggtgctgacagatcctgaggccgccaaatacgtgcacggaatcgccgtgcactggtatctggactttctggcccctgccaaggccacactgggagagacacacagactgttccccaacaccatgctgttcgccagcgaagcctgtgtgggcagcaagttttgggaacagagcgtgcggctcggcagctgggatagaggcatgcagtacagccacagcatcatcaccaacctgctgtaccacgtcgtcggctggaccgactggaatctggccctgaatcctgaaggcggccctaactgggtccgaaacttcgtggacagccccatcatcgtggacatcaccaaggacaccttctacaagcagcccatgttctaccacctgggacacttcagcaagttcatccccgagggctctcagcgcgttggactggtggcttcccagaagaacgatctggacgccgtggctctgatgcaccctgatggatctgctgtggtggtggtcctgaaccgcagcagcaaagatgtgcccctgaccatcaaggatcccgccgtgggattcctggaaacaatcagccctggctactccatccacacctacctgtggcgtagacagggaggggggggttcgggtggcggcggaagtgggggcggtggttcttatggcaggaaaaagcggaggcaaaggcgccgccccccccagtagtaactcgaggacggggtgaactacgcctgaggatccgatctttttccctctgccaaaaattatggggacatcatgaagccccttgagcatctgacttctggctaataaaggaaatttattttcattgcaatagtgtgttggaattttttgtgtctctcactcggcctaggtagataagtagcatggcgggttaatcattaactacaaggaacccctagtgatggagttggccactccctctctgcgcgctcgctcgctcactgaggccgggcgaccaaaggtcgcccgacgcccgggctttgcccgggcggcctcagtgagcgagcgagcgcgcag

SEQ ID NO: 1766 - DNA, 4463 bp, synthetic construct
  source 1..4463: mol_type = other DNA
ctgcgcgctcgctcgctcactgaggccgcccgggcaaagcccgggcgtcgggcgacctttggtcgcccggcctcagtgagcgagcgagcgcgcagagagggagtggccaactccatcactaggggttccttgtagttaatgattaacccgccatgctacttatctaccagggtaatggggatcctctagaactatagctagtcgacattgattattgactagttattaatagtaatcaattacggggtcattagttcatagcccatatatggagttccgcgttacataacttacggtaaatggcccgcctggctgaccgcccaacgacccccgcccattgacgtcaataatgacgtatgttcccatagtaacgccaatagggactttccattgacgtcaatgggtggagtatttacggtaaactgcccacttggcagtacatcaagtgtatcatatgccaagtacgccccctattgacgtcaatgacggtaaatggcccgcctggcattatgcccagtacatgaccttatgggactttcctacttggcagtacatctacgtattagtcatcgctattaccatgtcgaggccacgttctgcttcactctccccatctcccccccctccccacccccaattttgtatttatttattttttaattattttgtgcagcgatgggggcggggggggggggcgcgcgccaggcggggcggggcggggcgaggggcggggcggggcgaggcggagaggtgcggcggcagccaatcagagcggcgcgctccgaaagtttccttttatggcgaggcggcggcggcggcggccctataaaaagcgaagcgcgcggcgggcgggagcaagctccggtgccgccaccatggaattcagcagccccagcagagaggaatgccccaagcctctgagccgggtgtcaatcatggccggatctctgacaggactgctgctgcttcaggccgtgtcttgggcttctggcgctagaccttgcatccccaagagcttcggctacagcagcgtcgtgtgcgtgtgcaatgccacctactgcgacagcttcgaccctcctacctttcctgctctgggcaccttcagcagatacgagagcaccagatccggcagacggatggaactgagcatgggacccatccaggccaatcacacaggcactggcctgctgctgacactgcagcctgagcagaaattccagaaagtgaaaggcttcggcggagccatgacagatgccgccgctctgaatatcctggctctgtctccaccagctcagaacctgctgctcaagagctacttcagcgaggaaggcatcggctacaacatcatcagagtgcccatggccagctgcgacttcagcatcaggacctacacctacgccgacacacccgacgatttccagctgcacaacttcagcctgcctgaagaggacaccaagctgaagatccctctgatccacagagccctgcagctggcacaaagacccgtgtcactgctggcctctccatggacatctcccacctggctgaaaacaaatggcgccgtgaatggcaagggcagcctgaaaggccaacctggcgacatctaccaccagacctgggccagatacttcgtgaagttcctggacgcctatgccgagcacaagctgcagttttgggccgtgacagccgagaacgaaccttctgctggactgctgagcggctacccctttcagtgcctgggctttacacccgagcaccagcgggactttatcgcccgtgatctgggacccacactggccaatagcacccaccataatgtgcggctgctgatgctggacgaccagagactgcttctgccccactgggctaaagtggtgctgacagatcctgaggccgccaaatacgtgcacggaatcgccgtgcactggtatctggactttctggcccctgccaaggccacactgggagagacacacagactgttccccaacaccatgctgttcgccagcgaagcctgtgtgggcagcaagttttgggaacagagcgtgcggctcggcagctgggatagaggcatgcagtacagccacagcatcatcaccaacctgctgtaccacgtcgtcggctggaccgactggaatctggccctgaatcctgaaggcggccctaactgggtccgaaacttcgtggacagccccatcatcgtggacatcaccaaggacaccttctacaagcagcccatgttctaccacctgggacacttcagcaagttcatccccgagggctctcagcgcgttggactggtggcttcccagaagaacgatctggacgccgtggctctgatgcaccctgatggatctgctgtggtggtggtcctgaaccgcagcagcaaagatgtgcccctgaccatcaaggatcccgccgtgggattcctggaaacaatcagccctggctactccatccacacctacctgtggcgtagacagagaaagaggcgagagggcagaggaagtcttctaacatgcggtgacgtggaggagaatcccggccctatgtacgccctcttcctcctggccagcctcctgggcgcggctctagccggcccggtccttggactgaaagaatgcaccaggggctcggcagtgtggtgccagaatgtgaagacggcgtccgactgcggggcagtgaagcactgcctgcagaccgtttggaacaagccaacagtgaaatcccttccctgcgacatatgcaaagacgttgtcaccgcagctggtgatatgctgaaggacaatgccactgaggaggagatccttgtttacttggagaagacctgtgactggcttccgaaaccgaacatgtctgcttcatgcaaggagatagtggactcctacctccctgtcatcctggacatcattaaaggagaaatgagccgtcctggggaggtgtgctctgctctcaacctctgcgagtctctccagaagcacctagcagagctgaatcaccagaagcagctggagtccaataagatcccagagctggacatgactgaggtggtggcccccttcatggccaacatccctctcctcctctaccctcaggacggcccccgcagcaagccccagccaaaggataatggggacgtttgccaggactgcattcagatggtgactgacatccagactgctgtacggaccaactccacctttgtccaggccttggtggaacatgtcaaggaggagtgtgaccgcctgggccctggcatggccgacatatgcaagaactatatcagccagtattctgaaattgctatccagatgatgatgcacatgcaacccaaggagatctgtgcgctggttgggttctgtgatgaggtgaaagagatgcccatgcagactctggtccccgccaaagtggcctccaagaatgtcatccctgccctggaactggtggagcccattaagaagcacgaggtcccagcaaagtctgatgtttactgtgaggtgtgtgaattcctggtgaaggaggtgaccaagctgattgacaacaacaagactgagaaagaaatactcgacgcttttgacaaaatgtgctcgaagctgccgaagtccctgtcggaagagtgccaggaggtggtggacacgtacggcagctccatcctgtccatcctgctggaggaggtcagccctgagctggtgtgcagcatgctgcacctctgctctggcacgcggctgcctgcactgaccgttcacgtgactcagccaaaggacggtggcttctgcgaagtgtgcaagaagctggtgggttatttggatcgcaacctggagaaaaacagcaccaagcaggagatcctggctgctcttgagaaaggctgcagcttcctgccagacccttaccagaagcagtgtgatcagtttgtggcagagtacgagcccgtgctgatcgagatcctggtggaggtgatggatccttccttcgtgtgcttgaaaattggagcctgcccctcggcccataagcccttgttgggaactgagaagtgtatatggggcccaagctactggtgccagaacacagagacagcagcccagtgcaatgctgtcgagcattgcaaacgccatgtgtggaactagtagtaactcgaggacggggtgaactacgcctgaggatccgatctttttccctctgccaaaaattatggggacatcatgaagccccttgagcatctgacttctggctaataaaggaaatttattttcattgcaatagtgtgttggaattttttgtgtctctcactcggcctaggtagataagtagcatggcgggttaatcattaactacaaggaacccctagtgatggagttggccactccctctctgcgcgctcgctcgctcactgaggccgggcgaccaaaggtcgcccgacgcccgggctttgcccgggcggcctcagtgagcgagcgagcgcgcag

SEQ ID NO: 1767 - DNA, 3878 bp, synthetic construct
  source 1..3878: mol_type = other DNA
ctgcgcgctcgctcgctcactgaggccgcccgggcaaagcccgggcgtcgggcgacctttggtcgcccggcctcagtgagcgagcgagcgcgcagagagggagtggccaactccatcactaggggttccttgtagttaatgattaacccgccatgctacttatctaccagggtaatggggatcctctagaactatagctagtcgacattgattattgactagttattaatagtaatcaattacggggtcattagttcatagcccatatatggagttccgcgttacataacttacggtaaatggcccgcctggctgaccgcccaacgacccccgcccattgacgtcaataatgacgtatgttcccatagtaacgccaatagggactttccattgacgtcaatgggtggagtatttacggtaaactgcccacttggcagtacatcaagtgtatcatatgccaagtacgccccctattgacgtcaatgacggtaaatggcccgcctggcattatgcccagtacatgaccttatgggactttcctacttggcagtacatctacgtattagtcatcgctattaccatgtcgaggccacgttctgcttcactctccccatctcccccccctccccacccccaattttgtatttatttattttttaattattttgtgcagcgatgggggcggggggggggggcgcgcgccaggcggggcggggcggggcgaggggcggggcggggcgaggcggagaggtgcggcggcagccaatcagagcggcgcgctccgaaagtttccttttatggcgaggcggcggcggcggcggccctataaaaagcgaagcgcgcggcgggcgggagcaagcttcgtttagtgaaccgtcagatcgcctggagacgccatccacgctgttttgacctccatagaagacaccgggaccgatccagcctccgcggattcgaatcccggccgggaacggtgcattggaacgcggattccccgtgccaagagtgacgtaagtaccgcctatagagtctataggcccacaaaaaatgctttcttcttttaatatacttttttgtttatcttatttctaatactttccctaatctctttctttcagggcaataatgatacaatgtatcatgcctctttgcaccattctaaagaataacagtgataatttctgggttaaggcaatagcaatatttctgcatataaatatttctgcatataaattgtaactgatgtaagaggtttcatattgctaatagcagctacaatccagctaccattctgcttttattttatggttgggataaggctggattattctgagtccaagctaggcccttttgctaatcatgttcatacctcttatcttcctcccacagctcctgggcaacgtgctggtctgtgtgctggcccatcactttggcaaagaattgggattcgaaccggtgccgccaccatggaattcagcagccccagcagagaggaatgccccaagcctctgagccgggtgtcaatcatggccggatctctgacaggactgctgctgcttcaggccgtgtcttgggcttctggcgctagaccttgcatccccaagagcttcggctacagcagcgtcgtgtgcgtgtgcaatgccacctactgcgacagcttcgaccctcctacctttcctgctctgggcaccttcagcagatacgagagcaccagatccggcagacggatggaactgagcatgggacccatccaggccaatcacacaggcactggcctgctgctgacactgcagcctgagcagaaattccagaaagtgaaaggcttcggcggagccatgacagatgccgccgctctgaatatcctggctctgtctccaccagctcagaacctgctgctcaagagctacttcagcgaggaaggcatcggctacaacatcatcagagtgcccatggccagctgcgacttcagcatcaggacctacacctacgccgacacacccgacgatttccagctgcacaacttcagcctgcctgaagaggacaccaagctgaagatccctctgatccacagagccctgcagctggcacaaagacccgtgtcactgctggcctctccatggacatctcccacctggctgaaaacaaatggcgccgtgaatggcaagggcagcctgaaaggccaacctggcgacatctaccaccagacctgggccagatacttcgtgaagttcctggacgcctatgccgagcacaagctgcagttttgggccgtgacagccgagaacgaaccttctgctggactgctgagcggctacccctttcagtgcctgggctttacacccgagcaccagcgggactttatcgcccgtgatctgggacccacactggccaatagcacccaccataatgtgcggctgctgatgctggacgaccagagactgcttctgccccactgggctaaagtggtgctgacagatcctgaggccgccaaatacgtgcacggaatcgccgtgcactggtatctggactttctggcccctgccaaggccacactgggagagacacacagactgttccccaacaccatgctgttcgccagcgaagcctgtgtgggcagcaagttttgggaacagagcgtgcggctcggcagctgggatagaggcatgcagtacagccacagcatcatcaccaacctgctgtaccacgtcgtcggctggaccgactggaatctggccctgaatcctgaaggcggccctaactgggtccgaaacttcgtggacagccccatcatcgtggacatcaccaaggacaccttctacaagcagcccatgttctaccacctgggacacttcagcaagttcatccccgagggctctcagcgcgttggactggtggcttcccagaagaacgatctggacgccgtggctctgatgcaccctgatggatctgctgtggtggtggtcctgaaccgcagcagcaaagatgtgcccctgaccatcaaggatcccgccgtgggattcctggaaacaatcagccctggctactccatccacacctacctgtggcgtagacagagaaagaggcgagagggcagaggaagtcttctaacatgcggtgacgtggaggagaatcccggccctatgtacgccctcttcctcctggccagcctcctgggcgcggctctagccgtgaaagagatgcccatgcagactctggtccccgccaaagtggcctccaagaatgtcatccctgccctggaactggtggagcccattaagaagcacgaggtcccagcaaagtctgatgtttactgtgaggtgtgtgaattcctggtgaaggaggtgaccaagctgattgacaacaacaagactgagaaagaaatactcgacgcttttgacaaaatgtgctcgaagctgccgaagtccctgtcggaagagtgccaggaggtggtggacacgtacggcagctccatcctgtccatcctgctggaggaggtcagccctgagctggtgtgcagcatgctgcacctctgctctggctagtaactcgaggacggggtgaactacgcctgaggatccgatctttttccctctgccaaaaattatggggacatcatgaagccccttgagcatctgacttctggctaataaaggaaatttattttcattgcaatagtgtgttggaattttttgtgtctctcactcggcctaggtagataagtagcatggcgggttaatcattaactacaaggaacccctagtgatggagttggccactccctctctgcgcgctcgctcgctcactgaggccgggcgaccaaaggtcgcccgacgcccgggctttgcccgggcggcctcagtgagcgagcgagcgcgcag

SEQ ID NO: 1768 - DNA, 3767 bp, synthetic construct
  source 1..3767: mol_type = other DNA
ctgcgcgctcgctcgctcactgaggccgcccgggcaaagcccgggcgtcgggcgacctttggtcgcccggcctcagtgagcgagcgagcgcgcagagagggagtggccaactccatcactaggggttccttgtagttaatgattaacccgccatgctacttatctaccagggtaatggggatcctctagaactatagctagtcgacattgattattgactagttattaatagtaatcaattacggggtcattagttcatagcccatatatggagttccgcgttacataacttacggtaaatggcccgcctggctgaccgcccaacgacccccgcccattgacgtcaataatgacgtatgttcccatagtaacgccaatagggactttccattgacgtcaatgggtggagtatttacggtaaactgcccacttggcagtacatcaagtgtatcatatgccaagtacgccccctattgacgtcaatgacggtaaatggcccgcctggcattatgcccagtacatgaccttatgggactttcctacttggcagtacatctacgtattagtcatcgctattaccatgtcgaggccacgttctgcttcactctccccatctcccccccctccccacccccaattttgtatttatttattttttaattattttgtgcagcgatgggggcggggggggggggcgcgcgccaggcggggcggggcggggcgaggggcggggcggggcgaggcggagaggtgcggcggcagccaatcagagcggcgcgctccgaaagtttccttttatggcgaggcggcggcggcggcggccctataaaaagcgaagcgcgcggcgggcgggagcaagcttcgtttagtgaaccgtcagatcgcctggagacgccatccacgctgttttgacctccatagaagacaccgggaccgatccagcctccgcggattcgaatcccggccgggaacggtgcattggaacgcggattccccgtgccaagagtgacgtaagtaccgcctatagagtctataggcccacaaaaaatgctttcttcttttaatatacttttttgtttatcttatttctaatactttccctaatctctttctttcagggcaataatgatacaatgtatcatgcctctttgcaccattctaaagaataacagtgataatttctgggttaaggcaatagcaatatttctgcatataaatatttctgcatataaattgtaactgatgtaagaggtttcatattgctaatagcagctacaatccagctaccattctgcttttattttatggttgggataaggctggattattctgagtccaagctaggcccttttgctaatcatgttcatacctcttatcttcctcccacagctcctgggcaacgtgctggtctgtgtgctggcccatcactttggcaaagaattgggattcgaaccggtgccgccaccatggaattcagcagccccagcagagaggaatgccccaagcctctgagccgggtgtcaatcatggccggatctctgacaggactgctgctgcttcaggccgtgtcttgggcttctggcgctagaccttgcatccccaagagcttcggctacagcagcgtcgtgtgcgtgtgcaatgccacctactgcgacagcttcgaccctcctacctttcctgctctgggcaccttcagcagatacgagagcaccagatccggcagacggatggaactgagcatgggacccatccaggccaatcacacaggcactggcctgctgctgacactgcagcctgagcagaaattccagaaagtgaaaggcttcggcggagccatgacagatgccgccgctctgaatatcctggctctgtctccaccagctcagaacctgctgctcaagagctacttcagcgaggaaggcatcggctacaacatcatcagagtgcccatggccagctgcgacttcagcatcaggacctacacctacgccgacacacccgacgatttccagctgcacaacttcagcctgcctgaagaggacaccaagctgaagatccctctgatccacagagccctgcagctggcacaaagacccgtgtcactgctggcctctccatggacatctcccacctggctgaaaacaaatggcgccgtgaatggcaagggcagcctgaaaggccaacctggcgacatctaccaccagacctgggccagatacttcgtgaagttcctggacgcctatgccgagcacaagctgcagttttgggccgtgacagccgagaacgaaccttctgctggactgctgagcggctacccctttcagtgcctgggctttacacccgagcaccagcgggactttatcgcccgtgatctgggacccacactggccaatagcacccaccataatgtgcggctgctgatgctggacgaccagagactgcttctgccccactgggctaaagtggtgctgacagatcctgaggccgccaaatacgtgcacggaatcgccgtgcactggtatctggactttctggcccctgccaaggccacactgggagagacacacagactgttccccaacaccatgctgttcgccagcgaagcctgtgtgggcagcaagttttgggaacagagcgtgcggctcggcagctgggatagaggcatgcagtacagccacagcatcatcaccaacctgctgtaccacgtcgtcggctggaccgactggaatctggccctgaatcctgaaggcggccctaactgggtccgaaacttcgtggacagccccatcatcgtggacatcaccaaggacaccttctacaagcagcccatgttctaccacctgggacacttcagcaagttcatccccgagggctctcagcgcgttggactggtggcttcccagaagaacgatctggacgccgtggctctgatgcaccctgatggatctgctgtggtggtggtcctgaaccgcagcagcaaagatgtgcccctgaccatcaaggatcccgccgtgggattcctggaaacaatcagccctggctactccatccacacctacctgtggcgtagacagagaaagaggcgagagggcagaggaagtcttctaacatgcggtgacgtggaggagaatcccggccctatgtacgccctcttcctcctggccagcctcctgggcgcggctctagcctctgatgtttactgtgaggtgtgtgaattcctggtgaaggaggtgaccaagctgattgacaacaacaagactgagaaagaaatactcgacgcttttgacaaaatgtgctcgaagctgccgaagtccctgtcggaagagtgccaggaggtggtggacacgtacggcagctccatcctgtccatcctgctggaggaggtcagccctgagctggtgtgcagcatgctgcacctctgctctggctagtaactcgaggacggggtgaactacgcctgaggatccgatctttttccctctgccaaaaattatggggacatcatgaagccccttgagcatctgacttctggctaataaaggaaatttattttcattgcaatagtgtgttggaattttttgtgtctctcactcggcctaggtagataagtagcatggcgggttaatcattaactacaaggaacccctagtgatggagttggccactccctctctgcgcgctcgctcgctcactgaggccgggcgaccaaaggtcgcccgacgcccgggctttgcccgggcggcctcagtgagcgagcgagcgcgcag

SEQ ID NO: 1769 - DNA, 3560 bp, synthetic construct
  source 1..3560: mol_type = other DNA
ctgcgcgctcgctcgctcactgaggccgcccgggcaaagcccgggcgtcgggcgacctttggtcgcccggcctcagtgagcgagcgagcgcgcagagagggagtggccaactccatcactaggggttccttgtagttaatgattaacccgccatgctacttatctaccagggtaatggggatcctctagaactatagctagtcgacattgattattgactagttattaatagtaatcaattacggggtcattagttcatagcccatatatggagttccgcgttacataacttacggtaaatggcccgcctggctgaccgcccaacgacccccgcccattgacgtcaataatgacgtatgttcccatagtaacgccaatagggactttccattgacgtcaatgggtggagtatttacggtaaactgcccacttggcagtacatcaagtgtatcatatgccaagtacgccccctattgacgtcaatgacggtaaatggcccgcctggcattatgcccagtacatgaccttatgggactttcctacttggcagtacatctacgtattagtcatcgctattaccatgtcgaggccacgttctgcttcactctccccatctcccccccctccccacccccaattttgtatttatttattttttaattattttgtgcagcgatgggggcggggggggggggcgcgcgccaggcggggcggggcggggcgaggggcggggcggggcgaggcggagaggtgcggcggcagccaatcagagcggcgcgctccgaaagtttccttttatggcgaggcggcggcggcggcggccctataaaaagcgaagcgcgcggcgggcgggagcaagcttcgtttagtgaaccgtcagatcgcctggagacgccatccacgctgttttgacctccatagaagacaccgggaccgatccagcctccgcggattcgaatcccggccgggaacggtgcattggaacgcggattccccgtgccaagagtgacgtaagtaccgcctatagagtctataggcccacaaaaaatgctttcttcttttaatatacttttttgtttatcttatttctaatactttccctaatctctttctttcagggcaataatgatacaatgtatcatgcctctttgcaccattctaaagaataacagtgataatttctgggttaaggcaatagcaatatttctgcatataaatatttctgcatataaattgtaactgatgtaagaggtttcatattgctaatagcagctacaatccagctaccattctgcttttattttatggttgggataaggctggattattctgagtccaagctaggcccttttgctaatcatgttcatacctcttatcttcctcccacagctcctgggcaacgtgctggtctgtgtgctggcccatcactttggcaaagaattgggattcgaaccggtgccgccaccatggaattcagcagccccagcagagaggaatgccccaagcctctgagccgggtgtcaatcatggccggatctctgacaggactgctgctgcttcaggccgtgtcttgggcttctggcgctagaccttgcatccccaagagcttcggctacagcagcgtcgtgtgcgtgtgcaatgccacctactgcgacagcttcgaccctcctacctttcctgctctgggcaccttcagcagatacgagagcaccagatccggcagacggatggaactgagcatgggacccatccaggccaatcacacaggcactggcctgctgctgacactgcagcctgagcagaaattccagaaagtgaaaggcttcggcggagccatgacagatgccgccgctctgaatatcctggctctgtctccaccagctcagaacctgctgctcaagagctacttcagcgaggaaggcatcggctacaacatcatcagagtgcccatggccagctgcgacttcagcatcaggacctacacctacgccgacacacccgacgatttccagctgcacaacttcagcctgcctgaagaggacaccaagctgaagatccctctgatccacagagccctgcagctggcacaaagacccgtgtcactgctggcctctccatggacatctcccacctggctgaaaacaaatggcgccgtgaatggcaagggcagcctgaaaggccaacctggcgacatctaccaccagacctgggccagatacttcgtgaagttcctggacgcctatgccgagcacaagctgcagttttgggccgtgacagccgagaacgaaccttctgctggactgctgagcggctacccctttcagtgcctgggctttacacccgagcaccagcgggactttatcgcccgtgatctgggacccacactggccaatagcacccaccataatgtgcggctgctgatgctggacgaccagagactgcttctgccccactgggctaaagtggtgctgacagatcctgaggccgccaaatacgtgcacggaatcgccgtgcactggtatctggactttctggcccctgccaaggccacactgggagagacacacagactgttccccaacaccatgctgttcgccagcgaagcctgtgtgggcagcaagttttgggaacagagcgtgcggctcggcagctgggatagaggcatgcagtacagccacagcatcatcaccaacctgctgtaccacgtcgtcggctggaccgactggaatctggccctgaatcctgaaggcggccctaactgggtccgaaacttcgtggacagccccatcatcgtggacatcaccaaggacaccttctacaagcagcccatgttctaccacctgggacacttcagcaagttcatccccgagggctctcagcgcgttggactggtggcttcccagaagaacgatctggacgccgtggctctgatgcaccctgatggatctgctgtggtggtggtcctgaaccgcagcagcaaagatgtgcccctgaccatcaaggatcccgccgtgggattcctggaaacaatcagccctggctactccatccacacctacctgtggcgtagacagggaggggggggttcgggtggcggcggaagtgggggcggtggttcttccgtaatcgacgccttacagtataagctggagggaaccaccagattgacaaggaaacgagggcttaagcttgctactgcactatccctgagcaataaattttagtaactcgaggacggggtgaactacgcctgaggatccgatctttttccctctgccaaaaattatggggacatcatgaagccccttgagcatctgacttctggctaataaaggaaatttattttcattgcaatagtgtgttggaattttttgtgtctctcactcggcctaggtagataagtagcatggcgggttaatcattaactacaaggaacccctagtgatggagttggccactccctctctgcgcgctcgctcgctcactgaggccgggcgaccaaaggtcgcccgacgcccgggctttgcccgggcggcctcagtgagcgagcgagcgcgcag

SEQ ID NO: 1770 - DNA, 3500 bp, synthetic construct
  source 1..3500: mol_type = other DNA
ctgcgcgctcgctcgctcactgaggccgcccgggcaaagcccgggcgtcgggcgacctttggtcgcccggcctcagtgagcgagcgagcgcgcagagagggagtggccaactccatcactaggggttccttgtagttaatgattaacccgccatgctacttatctaccagggtaatggggatcctctagaactatagctagtcgacattgattattgactagttattaatagtaatcaattacggggtcattagttcatagcccatatatggagttccgcgttacataacttacggtaaatggcccgcctggctgaccgcccaacgacccccgcccattgacgtcaataatgacgtatgttcccatagtaacgccaatagggactttccattgacgtcaatgggtggagtatttacggtaaactgcccacttggcagtacatcaagtgtatcatatgccaagtacgccccctattgacgtcaatgacggtaaatggcccgcctggcattatgcccagtacatgaccttatgggactttcctacttggcagtacatctacgtattagtcatcgctattaccatgtcgaggccacgttctgcttcactctccccatctcccccccctccccacccccaattttgtatttatttattttttaattattttgtgcagcgatgggggcggggggggggggcgcgcgccaggcggggcggggcggggcgaggggcggggcggggcgaggcggagaggtgcggcggcagccaatcagagcggcgcgctccgaaagtttccttttatggcgaggcggcggcggcggcggccctataaaaagcgaagcgcgcggcgggcgggagcaagcttcgtttagtgaaccgtcagatcgcctggagacgccatccacgctgttttgacctccatagaagacaccgggaccgatccagcctccgcggattcgaatcccggccgggaacggtgcattggaacgcggattccccgtgccaagagtgacgtaagtaccgcctatagagtctataggcccacaaaaaatgctttcttcttttaatatacttttttgtttatcttatttctaatactttccctaatctctttctttcagggcaataatgatacaatgtatcatgcctctttgcaccattctaaagaataacagtgataatttctgggttaaggcaatagcaatatttctgcatataaatatttctgcatataaattgtaactgatgtaagaggtttcatattgctaatagcagctacaatccagctaccattctgcttttattttatggttgggataaggctggattattctgagtccaagctaggcccttttgctaatcatgttcatacctcttatcttcctcccacagctcctgggcaacgtgctggtctgtgtgctggcccatcactttggcaaagaattgggattcgaaccggtgccgccaccatggaattcagcagccccagcagagaggaatgccccaagcctctgagccgggtgtcaatcatggccggatctctgacaggactgctgctgcttcaggccgtgtcttgggcttctggctatggcaggaaaaagcggaggcaaaggcgccgccccccccagggaggggggggttcgggtggcggcggaagtgggggcggtggttctgctagaccttgcatccccaagagcttcggctacagcagcgtcgtgtgcgtgtgcaatgccacctactgcgacagcttcgaccctcctacctttcctgctctgggcaccttcagcagatacgagagcaccagatccggcagacggatggaactgagcatgggacccatccaggccaatcacacaggcactggcctgctgctgacactgcagcctgagcagaaattccagaaagtgaaaggcttcggcggagccatgacagatgccgccgctctgaatatcctggctctgtctccaccagctcagaacctgctgctcaagagctacttcagcgaggaaggcatcggctacaacatcatcagagtgcccatggccagctgcgacttcagcatcaggacctacacctacgccgacacacccgacgatttccagctgcacaacttcagcctgcctgaagaggacaccaagctgaagatccctctgatccacagagccctgcagctggcacaaagacccgtgtcactgctggcctctccatggacatctcccacctggctgaaaacaaatggcgccgtgaatggcaagggcagcctgaaaggccaacctggcgacatctaccaccagacctgggccagatacttcgtgaagttcctggacgcctatgccgagcacaagctgcagttttgggccgtgacagccgagaacgaaccttctgctggactgctgagcggctacccctttcagtgcctgggctttacacccgagcaccagcgggactttatcgcccgtgatctgggacccacactggccaatagcacccaccataatgtgcggctgctgatgctggacgaccagagactgcttctgccccactgggctaaagtggtgctgacagatcctgaggccgccaaatacgtgcacggaatcgccgtgcactggtatctggactttctggcccctgccaaggccacactgggagagacacacagactgttccccaacaccatgctgttcgccagcgaagcctgtgtgggcagcaagttttgggaacagagcgtgcggctcggcagctgggatagaggcatgcagtacagccacagcatcatcaccaacctgctgtaccacgtcgtcggctggaccgactggaatctggccctgaatcctgaaggcggccctaactgggtccgaaacttcgtggacagccccatcatcgtggacatcaccaaggacaccttctacaagcagcccatgttctaccacctgggacacttcagcaagttcatccccgagggctctcagcgcgttggactggtggcttcccagaagaacgatctggacgccgtggctctgatgcaccctgatggatctgctgtggtggtggtcctgaaccgcagcagcaaagatgtgcccctgaccatcaaggatcccgccgtgggattcctggaaacaatcagccctggctactccatccacacctacctgtggcgtagacagtagtaactcgaggacggggtgaactacgcctgaggatccgatctttttccctctgccaaaaattatggggacatcatgaagccccttgagcatctgacttctggctaataaaggaaatttattttcattgcaatagtgtgttggaattttttgtgtctctcactcggcctaggtagataagtagcatggcgggttaatcattaactacaaggaacccctagtgatggagttggccactccctctctgcgcgctcgctcgctcactgaggccgggcgaccaaaggtcgcccgacgcccgggctttgcccgggcggcctcagtgagcgagcgagcgcgcag

SEQ ID NO: 1771 - DNA, 3458 bp, synthetic construct
  source 1..3458: mol_type = other DNA
ctgcgcgctcgctcgctcactgaggccgcccgggcaaagcccgggcgtcgggcgacctttggtcgcccggcctcagtgagcgagcgagcgcgcagagagggagtggccaactccatcactaggggttccttgtagttaatgattaacccgccatgctacttatctaccagggtaatggggatcctctagaactatagctagtcgacattgattattgactagttattaatagtaatcaattacggggtcattagttcatagcccatatatggagttccgcgttacataacttacggtaaatggcccgcctggctgaccgcccaacgacccccgcccattgacgtcaataatgacgtatgttcccatagtaacgccaatagggactttccattgacgtcaatgggtggagtatttacggtaaactgcccacttggcagtacatcaagtgtatcatatgccaagtacgccccctattgacgtcaatgacggtaaatggcccgcctggcattatgcccagtacatgaccttatgggactttcctacttggcagtacatctacgtattagtcatcgctattaccatgtcgaggccacgttctgcttcactctccccatctcccccccctccccacccccaattttgtatttatttattttttaattattttgtgcagcgatgggggcggggggggggggcgcgcgccaggcggggcggggcggggcgaggggcggggcggggcgaggcggagaggtgcggcggcagccaatcagagcggcgcgctccgaaagtttccttttatggcgaggcggcggcggcggcggccctataaaaagcgaagcgcgcggcgggcgggagcaagcttcgtttagtgaaccgtcagatcgcctggagacgccatccacgctgttttgacctccatagaagacaccgggaccgatccagcctccgcggattcgaatcccggccgggaacggtgcattggaacgcggattccccgtgccaagagtgacgtaagtaccgcctatagagtctataggcccacaaaaaatgctttcttcttttaatatacttttttgtttatcttatttctaatactttccctaatctctttctttcagggcaataatgatacaatgtatcatgcctctttgcaccattctaaagaataacagtgataatttctgggttaaggcaatagcaatatttctgcatataaatatttctgcatataaattgtaactgatgtaagaggtttcatattgctaatagcagctacaatccagctaccattctgcttttattttatggttgggataaggctggattattctgagtccaagctaggcccttttgctaatcatgttcatacctcttatcttcctcccacagctcctgggcaacgtgctggtctgtgtgctggcccatcactttggcaaagaattgggattcgaaccggtgccgccaccatggaattcagcagccccagcagagaggaatgccccaagcctctgagccgggtgtcaatcatggccggatctctgacaggactgctgctgcttcaggccgtgtcttgggcttctggcgctagaccttgcatccccaagagcttcggctacagcagcgtcgtgtgcgtgtgcaatgccacctactgcgacagcttcgaccctcctacctttcctgctctgggcaccttcagcagatacgagagcaccagatccggcagacggatggaactgagcatgggacccatccaggccaatcacacaggcactggcctgctgctgacactgcagcctgagcagaaattccagaaagtgaaaggcttcggcggagccatgacagatgccgccgctctgaatatcctggctctgtctccaccagctcagaacctgctgctcaagagctacttcagcgaggaaggcatcggctacaacatcatcagagtgcccatggccagctgcgacttcagcatcaggacctacacctacgccgacacacccgacgatttccagctgcacaacttcagcctgcctgaagaggacaccaagctgaagatccctctgatccacagagccctgcagctggcacaaagacccgtgtcactgctggcctctccatggacatctcccacctggctgaaaacaaatggcgccgtgaatggcaagggcagcctgaaaggccaacctggcgacatctaccaccagacctgggccagatacttcgtgaagttcctggacgcctatgccgagcacaagctgcagttttgggccgtgacagccgagaacgaaccttctgctggactgctgagcggctacccctttcagtgcctgggctttacacccgagcaccagcgggactttatcgcccgtgatctgggacccacactggccaatagcacccaccataatgtgcggctgctgatgctggacgaccagagactgcttctgccccactgggctaaagtggtgctgacagatcctgaggccgccaaatacgtgcacggaatcgccgtgcactggtatctggactttctggcccctgccaaggccacactgggagagacacacagactgttccccaacaccatgctgttcgccagcgaagcctgtgtgggcagcaagttttgggaacagagcgtgcggctcggcagctgggatagaggcatgcagtacagccacagcatcatcaccaacctgctgtaccacgtcgtcggctggaccgactggaatctggccctgaatcctgaaggcggccctaactgggtccgaaacttcgtggacagccccatcatcgtggacatcaccaaggacaccttctacaagcagcccatgttctaccacctgggacacttcagcaagttcatccccgagggctctcagcgcgttggactggtggcttcccagaagaacgatctggacgccgtggctctgatgcaccctgatggatctgctgtggtggtggtcctgaaccgcagcagcaaagatgtgcccctgaccatcaaggatcccgccgtgggattcctggaaacaatcagccctggctactccatccacacctacctgtggcgtagacagaagtttgaaagacagcagaaaatcctggatcagagattcttcgagtagtaactcgaggacggggtgaactacgcctgaggatccgatctttttccctctgccaaaaattatggggacatcatgaagccccttgagcatctgacttctggctaataaaggaaatttattttcattgcaatagtgtgttggaattttttgtgtctctcactcggcctaggtagataagtagcatggcgggttaatcattaactacaaggaacccctagtgatggagttggccactccctctctgcgcgctcgctcgctcactgaggccgggcgaccaaaggtcgcccgacgcccgggctttgcccgggcggcctcagtgagcgagcgagcgcgcag

SEQ ID NO: 1772 - DNA, 1608 bp, synthetic construct
  source 1..1608: mol_type = other DNA
atggaattctctagcccatctagagaggaatgtcctaagcctctgtcaagagtgtccatcatggccggcagcctgacaggcctgctgctgctgcaggccgtgtcctgggccagtggagcccggccctgcatccctaagtccttcggctattctagcgtggtctgcgtgtgtaatgccacttactgcgacagcttcgaccctcctaccttccccgcccttggaacattcagcagatacgagagcaccagaagcggcagaagaatggaactgagcatgggcccaatccaggccaaccacaccggcaccggcctgctgctgacactgcaacctgagcagaagttccagaaggtgaagggatttggaggcgccatgaccgacgctgctgctctgaacatcctggccctctccccacctgctcagaacctgctgcttaaaagctacttcagcgaggaaggcatcggctataacatcatcagagtgcccatggccagctgcgacttcagcatcagaacatacacctacgccgatacacctgatgacttccaactgcacaacttcagcctgcctgaagaggacacaaagctgaaaatccccctgatccaccgggccctgcagctggcccagagacctgtgagcctgctggcctctccttggacaagccccacctggctgaagaccaatggagctgtgaacggcaagggcagcctgaagggccagcccggcgacatctaccaccaaacctgggctcgctacttcgtgaaattcctggacgcctacgctgagcataagctgcaattttgggccgttacagccgagaacgagccttctgccggcctgctgtctggatatcctttccagtgcctgggcttcacccctgagcaccagagagactttatcgccagagatctggggcctaccctggctaacagcacacaccacaacgtgcggctgctgatgctggacgatcagaggctgctgctcccccactgggccaaggtggtgctgacagatccggaggccgccaaatacgtgcacggcatcgccgtccactggtacctggatttcctggcccctgccaaggccaccctgggcgagacacatagactgtttcctaataccatgctgttcgccagcgaggcctgcgtgggcagcaagttctgggaacagagcgtgcggctgggcagctgggacagaggaatgcagtacagccacagcatcattaccaacctgctgtaccacgtggtgggctggaccgactggaacctggccctgaaccccgaaggcggccccaactgggtgcggaacttcgtggactctcctatcatcgtggatattaccaaggataccttttacaagcagcctatgttctaccacctgggccacttcagcaagttcatccctgagggctctcagcgggtgggcctggtggcctctcagaaaaacgacctggatgccgttgccctgatgcaccccgacggcagcgccgtggtggtcgtcctgaatagaagctccaaggacgtgcctctgaccatcaaggaccccgctgtgggatttctggaaaccatcagccctggctacagcatccacacctacctgtggcggcggcag

SEQ ID NO: 1773 - DNA, 1491 bp, synthetic construct
  source 1..1491: mol_type = other DNA
gcccggccctgcatccctaagtccttcggctattctagcgtggtctgcgtgtgtaatgccacttactgcgacagcttcgaccctcctaccttccccgcccttggaacattcagcagatacgagagcaccagaagcggcagaagaatggaactgagcatgggcccaatccaggccaaccacaccggcaccggcctgctgctgacactgcaacctgagcagaagttccagaaggtgaagggatttggaggcgccatgaccgacgctgctgctctgaacatcctggccctctccccacctgctcagaacctgctgcttaaaagctacttcagcgaggaaggcatcggctataacatcatcagagtgcccatggccagctgcgacttcagcatcagaacatacacctacgccgatacacctgatgacttccaactgcacaacttcagcctgcctgaagaggacacaaagctgaaaatccccctgatccaccgggccctgcagctggcccagagacctgtgagcctgctggcctctccttggacaagccccacctggctgaagaccaatggagctgtgaacggcaagggcagcctgaagggccagcccggcgacatctaccaccaaacctgggctcgctacttcgtgaaattcctggacgcctacgctgagcataagctgcaattttgggccgttacagccgagaacgagccttctgccggcctgctgtctggatatcctttccagtgcctgggcttcacccctgagcaccagagagactttatcgccagagatctggggcctaccctggctaacagcacacaccacaacgtgcggctgctgatgctggacgatcagaggctgctgctcccccactgggccaaggtggtgctgacagatccggaggccgccaaatacgtgcacggcatcgccgtccactggtacctggatttcctggcccctgccaaggccaccctgggcgagacacatagactgtttcctaataccatgctgttcgccagcgaggcctgcgtgggcagcaagttctgggaacagagcgtgcggctgggcagctgggacagaggaatgcagtacagccacagcatcattaccaacctgctgtaccacgtggtgggctggaccgactggaacctggccctgaaccccgaaggcggccccaactgggtgcggaacttcgtggactctcctatcatcgtggatattaccaaggataccttttacaagcagcctatgttctaccacctgggccacttcagcaagttcatccctgagggctctcagcgggtgggcctggtggcctctcagaaaaacgacctggatgccgttgccctgatgcaccccgacggcagcgccgtggtggtcgtcctgaatagaagctccaaggacgtgcctctgaccatcaaggaccccgctgtgggatttctggaaaccatcagccctggctacagcatccacacctacctgtggcggcggcag

SEQ ID NO: 1774 - protein, 536 aa, synthetic construct; identical to SEQ ID NO: 1740

SEQ ID NO: 1775 - protein, 497 aa, synthetic construct
ARPCIPKSFGYSSVVCVCNATYCDSFDPPTFPALGTFSRYESTRSGRRMELSMGPIQANHTGTGLLLTLQPEQKFQKVKGFGGAMTDAAALNILALSPPAQNLLLKSYFSEEGIGYNIIRVPMASCDFSIRTYTYADTPDDFQLHNFSLPEEDTKLKIPLIHRALQLAQRPVSLLASPWTSPTWLKTNGAVNGKGSLKGQPGDIYHQTWARYFVKFLDAYAEHKLQFWAVTAENEPSAGLLSGYPFQCLGFTPEHQRDFIARDLGPTLANSTHHNVRLLMLDDQRLLLPHWAKVVLTDPEAAKYVHGIAVHWYLDFLAPAKATLGETHRLFPNTMLFASEACVGSKFWEQSVRLGSWDRGMQYSHSIITNLLYHVVGWTDWNLALNPEGGPNWVRNFVDSPIIVDITKDTFYKQPMFYHLGHFSKFIPEGSQRVGLVASQKNDLDAVALMHPDGSAVVVVLNRSSKDVPLTIKDPAVGFLETISPGYSIHTYLWRRQ

SEQ ID NO: 1776 - DNA, 1608 bp, synthetic construct
  source 1..1608: mol_type = other DNA
atggagttttcaagtccttccagagaggaatgtcccaagcctttgagtagggtaagcatcatggctggcagcctcacaggattgcttctacttcaggcagtgtcgtgggcatcaggtgcccgcccctgcatccctaaaagcttcggctacagctcggtggtgtgtgtctgcaatgccacatactgtgactcctttgaccccccgacctttcctgcccttggtaccttcagccgctatgagagtacacgcagtgggcgacggatggagctgagtatggggcccatccaggctaatcacacgggcacaggcctgctactgaccctgcagccagaacagaagttccagaaagtgaagggatttggaggggccatgacagatgctgctgctctcaacatccttgccctgtcaccccctgcccaaaatttgctacttaaatcgtacttctctgaagaaggaatcggatataacatcatccgggtacccatggccagctgtgacttctccatccgcacctacacctatgcagacacccctgatgatttccagttgcacaacttcagcctcccagaggaagataccaagctcaagatacccctgattcaccgagccctgcagttggcccagcgtcccgtttcactccttgccagcccctggacatcacccacttggctcaagaccaatggagcggtgaatgggaaggggtcactcaagggacagcccggagacatctaccaccagacctgggccagatactttgtgaagttcctggatgcctatgctgagcacaagttacagttctgggcagtgacagctgaaaatgagccttctgctgggctgttgagtggataccccttccagtgcctgggcttcacccctgaacatcagcgagacttcattgcccgtgacctaggtcctaccctcgccaacagtactcaccacaatgtccgcctactcatgctggatgaccaacgcttgctgctgccccactgggcaaaggtggtactgacagacccagaagcagctaaatatgttcatggcattgctgtacattggtacctggactttctggctccagccaaagccaccctaggggagacacaccgcctgttccccaacaccatgctctttgcctcagaggcctgtgtgggctccaagttctgggagcagagtgtgcggctaggctcctgggatcgagggatgcagtacagccacagcatcatcacgaacctcctgtaccatgtggtcggctggaccgactggaaccttgccctgaaccccgaaggaggacccaattgggtgcgtaactttgtcgacagtcccatcattgtagacatcaccaaggacacgttttacaaacagcccatgttctaccaccttggccacttcagcaagttcattcctgagggctcccagagagtggggctggttgccagtcagaagaacgacctggacgcagtggcactgatgcatcccgatggctctgctgttgtggtcgtgctaaaccgctcctctaaggatgtgcctcttaccatcaaggatcctgctgtgggcttcctggagacaatctcacctggctactccattcacacctacctgtggcgtcgccag

SEQ ID NO: 1777 - DNA, 1491 bp, synthetic construct
  source 1..1491: mol_type = other DNA
gcccgcccctgcatccctaaaagcttcggctacagctcggtggtgtgtgtctgcaatgccacatactgtgactcctttgaccccccgacctttcctgcccttggtaccttcagccgctatgagagtacacgcagtgggcgacggatggagctgagtatggggcccatccaggctaatcacacgggcacaggcctgctactgaccctgcagccagaacagaagttccagaaagtgaagggatttggaggggccatgacagatgctgctgctctcaacatccttgccctgtcaccccctgcccaaaatttgctacttaaatcgtacttctctgaagaaggaatcggatataacatcatccgggtacccatggccagctgtgacttctccatccgcacctacacctatgcagacacccctgatgatttccagttgcacaacttcagcctcccagaggaagataccaagctcaagatacccctgattcaccgagccctgcagttggcccagcgtcccgtttcactccttgccagcccctggacatcacccacttggctcaagaccaatggagcggtgaatgggaaggggtcactcaagggacagcccggagacatctaccaccagacctgggccagatactttgtgaagttcctggatgcctatgctgagcacaagttacagttctgggcagtgacagctgaaaatgagccttctgctgggctgttgagtggataccccttccagtgcctgggcttcacccctgaacatcagcgagacttcattgcccgtgacctaggtcctaccctcgccaacagtactcaccacaatgtccgcctactcatgctggatgaccaacgcttgctgctgccccactgggcaaaggtggtactgacagacccagaagcagctaaatatgttcatggcattgctgtacattggtacctggactttctggctccagccaaagccaccctaggggagacacaccgcctgttccccaacaccatgctctttgcctcagaggcctgtgtgggctccaagttctgggagcagagtgtgcggctaggctcctgggatcgagggatgcagtacagccacagcatcatcacgaacctcctgtaccatgtggtcggctggaccgactggaaccttgccctgaaccccgaaggaggacccaattgggtgcgtaactttgtcgacagtcccatcattgtagacatcaccaaggacacgttttacaaacagcccatgttctaccaccttggccacttcagcaagttcattcctgagggctcccagagagtggggctggttgccagtcagaagaacgacctggacgcagtggcactgatgcatcccgatggctctgctgttgtggtcgtgctaaaccgctcctctaaggatgtgcctcttaccatcaaggatcctgctgtgggcttcctggagacaatctcacctggctactccattcacacctacctgtggcgtcgccag

SEQ ID NO: 1778 - protein, 536 aa, synthetic construct; identical to SEQ ID NO: 1740

SEQ ID NO: 1779 - protein, 497 aa, synthetic construct; identical to SEQ ID NO: 1775

SEQ ID NO: 1780 - DNA, 1608 bp, synthetic construct
  source 1..1608: mol_type = other DNA
atggaattcagcagccccagcagagaggaatgccccaagcctctgagccgggtgtcaatcatggccggatctctgacaggactgctgctgcttcaggccgtgtcttgggcttctggcgctagaccttgcatccccaagagcttcggctacagcagcgtcgtgtgcgtgtgcaatgccacctactgcgacagcttcgaccctcctacctttcctgctctgggcaccttcagcagatacgagagcaccagatccggcagacggatggaactgagcatgggacccatccaggccaatcacacaggcactggcctgctgctgacactgcagcctgagcagaaattccagaaagtgaaaggcttcggcggagccatgacagatgccgccgctctgaatatcctggctctgtctccaccagctcagaacctgctgctcaagagctacttcagcgaggaaggcatcggctacaacatcatcagagtgcccatggccagctgcgacttcagcatcaggacctacacctacgccgacacacccgacgatttccagctgcacaacttcagcctgcctgaagaggacaccaagctgaagatccctctgatccacagagccctgcagctggcacaaagacccgtgtcactgctggcctctccatggacatctcccacctggctgaaaacaaatggcgccgtgaatggcaagggcagcctgaaaggccaacctggcgacatctaccaccagacctgggccagatacttcgtgaagttcctggacgcctatgccgagcacaagctgcagttttgggccgtgacagccgagaacgaaccttctgctggactgctgagcggctacccctttcagtgcctgggctttacacccgagcaccagcgggactttatcgcccgtgatctgggacccacactggccaatagcacccaccataatgtgcggctgctgatgctggacgaccagagactgcttctgccccactgggctaaagtggtgctgacagatcctgaggccgccaaatacgtgcacggaatcgccgtgcactggtatctggactttctggcccctgccaaggccacactgggagagacacacagactgttccccaacaccatgctgttcgccagcgaagcctgtgtgggcagcaagttttgggaacagagcgtgcggctcggcagctgggatagaggcatgcagtacagccacagcatcatcaccaacctgctgtaccacgtcgtcggctggaccgactggaatctggccctgaatcctgaaggcggccctaactgggtccgaaacttcgtggacagccccatcatcgtggacatcaccaaggacaccttctacaagcagcccatgttctaccacctgggacacttcagcaagttcatccccgagggctctcagcgcgttggactggtggcttcccagaagaacgatctggacgccgtggctctgatgcaccctgatggatctgctgtggtggtggtcctgaaccgcagcagcaaagatgtgcccctgaccatcaaggatcccgccgtgggattcctggaaacaatcagccctggctactccatccacacctacctgtggcgtagacag

SEQ ID NO: 1781 - DNA, 1491 bp, synthetic construct
  source 1..1491: mol_type = other DNA
gctagaccttgcatccccaagagcttcggctacagcagcgtcgtgtgcgtgtgcaatgccacctactgcgacagcttcgaccctcctacctttcctgctctgggcaccttcagcagatacgagagcaccagatccggcagacggatggaactgagcatgggacccatccaggccaatcacacaggcactggcctgctgctgacactgcagcctgagcagaaattccagaaagtgaaaggcttcggcggagccatgacagatgccgccgctctgaatatcctggctctgtctccaccagctcagaacctgctgctcaagagctacttcagcgaggaaggcatcggctacaacatcatcagagtgcccatggccagctgcgacttcagcatcaggacctacacctacgccgacacacccgacgatttccagctgcacaacttcagcctgcctgaagaggacaccaagctgaagatccctctgatccacagagccctgcagctggcacaaagacccgtgtcactgctggcctctccatggacatctcccacctggctgaaaacaaatggcgccgtgaatggcaagggcagcctgaaaggccaacctggcgacatctaccaccagacctgggccagatacttcgtgaagttcctggacgcctatgccgagcacaagctgcagttttgggccgtgacagccgagaacgaaccttctgctggactgctgagcggctacccctttcagtgcctgggctttacacccgagcaccagcgggactttatcgcccgtgatctgggacccacactggccaatagcacccaccataatgtgcggctgctgatgctggacgaccagagactgcttctgccccactgggctaaagtggtgctgacagatcctgaggccgccaaatacgtgcacggaatcgccgtgcactggtatctggactttctggcccctgccaaggccacactgggagagacacacagactgttccccaacaccatgctgttcgccagcgaagcctgtgtgggcagcaagttttgggaacagagcgtgcggctcggcagctgggatagaggcatgcagtacagccacagcatcatcaccaacctgctgtaccacgtcgtcggctggaccgactggaatctggccctgaatcctgaaggcggccctaactgggtccgaaacttcgtggacagccccatcatcgtggacatcaccaaggacaccttctacaagcagcccatgttctaccacctgggacacttcagcaagttcatccccgagggctctcagcgcgttggactggtggcttcccagaagaacgatctggacgccgtggctctgatgcaccctgatggatctgctgtggtggtggtcctgaaccgcagcagcaaagatgtgcccctgaccatcaaggatcccgccgtgggattcctggaaacaatcagccctggctactccatccacacctacctgtggcgtagacag

SEQ ID NO: 1782 - protein, 536 aa, synthetic construct; identical to SEQ ID NO: 1740

SEQ ID NO: 1783 - protein, 497 aa, synthetic construct; identical to SEQ ID NO: 1775

SEQ ID NO: 1784 - protein, 82 aa, Homo sapiens
DGGFCEVCKKLVGYLDRNLEKNSTKQEILAALEKGCSFLPDPYQKQCDQFVAEYEPVLIEILVEVMDPSFVCLKIGACPSAH

SEQ ID NO: 1785 - protein, 508 aa, Homo sapiens
GPVLGLKECTRGSAVWCQNVKTASDCGAVKHCLQTVWNKPTVKSLPCDICKDVVTAAGDMLKDNATEEEILVYLEKTCDWLPKPNMSASCKEIVDSYLPVILDIIKGEMSRPGEVCSALNLCESLQKHLAELNHQKQLESNKIPELDMTEVVAPFMANIPLLLYPQDGPRSKPQPKDNGDVCQDCIQMVTDIQTAVRTNSTFVQALVEHVKEECDRLGPGMADICKNYISQYSEIAIQMMMHMQPKEICALVGFCDEVKEMPMQTLVPAKVASKNVIPALELVEPIKKHEVPAKSDVYCEVCEFLVKEVTKLIDNNKTEKEILDAFDKMCSKLPKSLSEECQEVVDTYGSSILSILLEEVSPELVCSMLHLCSGTRLPALTVHVTQPKDGGFCEVCKKLVGYLDRNLEKNSTKQEILAALEKGCSFLPDPYQKQCDQFVAEYEPVLIEILVEVMDPSFVCLKIGACPSAHKPLLGTEKCIWGPSYWCQNTETAAQCNAVEHCKRHVWN

SEQ ID NO: 1786 - DNA, 399 bp, Homo sapiens
  source 1..399: mol_type = genomic DNA
atgtacgccctcttcctcctggccagcctcctgggcgcggctctagccgtgaaagagatgcccatgcagactctggtccccgccaaagtggcctccaagaatgtcatccctgccctggaactggtggagcccattaagaagcacgaggtcccagcaaagtctgatgtttactgtgaggtgtgtgaattcctggtgaaggaggtgaccaagctgattgacaacaacaagactgagaaagaaatactcgacgcttttgacaaaatgtgctcgaagctgccgaagtccctgtcggaagagtgccaggaggtggtggacacgtacggcagctccatcctgtccatcctgctggaggaggtcagccctgagctggtgtgcagcatgctgcacctctgctctggc

SEQ ID NO: 1787 - DNA, 351 bp, Homo sapiens
  source 1..351: mol_type = genomic DNA
gtgaaagagatgcccatgcagactctggtccccgccaaagtggcctccaagaatgtcatccctgccctggaactggtggagcccattaagaagcacgaggtcccagcaaagtctgatgtttactgtgaggtgtgtgaattcctggtgaaggaggtgaccaagctgattgacaacaacaagactgagaaagaaatactcgacgcttttgacaaaatgtgctcgaagctgccgaagtccctgtcggaagagtgccaggaggtggtggacacgtacggcagctccatcctgtccatcctgctggaggaggtcagccctgagctggtgtgcagcatgctgcacctctgctctggc

SEQ ID NO: 1788 - protein, 133 aa, Homo sapiens
MYALFLLASLLGAALAVKEMPMQTLVPAKVASKNVIPALELVEPIKKHEVPAKSDVYCEVCEFLVKEVTKLIDNNKTEKEILDAFDKMCSKLPKSLSEECQEVVDTYGSSILSILLEEVSPELVCSMLHLCSG

SEQ ID NO: 1789 - protein, 117 aa, Homo sapiens
VKEMPMQTLVPAKVASKNVIPALELVEPIKKHEVPAKSDVYCEVCEFLVKEVTKLIDNNKTEKEILDAFDKMCSKLPKSLSEECQEVVDTYGSSILSILLEEVSPELVCSMLHLCSG

SEQ ID NO: 1790 - DNA, 288 bp, Homo sapiens
  source 1..288: mol_type = genomic DNA
atgtacgccctcttcctcctggccagcctcctgggcgcggctctagcctctgatgtttactgtgaggtgtgtgaattcctggtgaaggaggtgaccaagctgattgacaacaacaagactgagaaagaaatactcgacgcttttgacaaaatgtgctcgaagctgccgaagtccctgtcggaagagtgccaggaggtggtggacacgtacggcagctccatcctgtccatcctgctggaggaggtcagccctgagctggtgtgcagcatgctgcacctctgctctggc

SEQ ID NO: 1791 - DNA, 240 bp, Homo sapiens
  source 1..240: mol_type = genomic DNA
tctgatgtttactgtgaggtgtgtgaattcctggtgaaggaggtgaccaagctgattgacaacaacaagactgagaaagaaatactcgacgcttttgacaaaatgtgctcgaagctgccgaagtccctgtcggaagagtgccaggaggtggtggacacgtacggcagctccatcctgtccatcctgctggaggaggtcagccctgagctggtgtgcagcatgctgcacctctgctctggc

SEQ ID NO: 1792 - protein, 96 aa, Homo sapiens
MYALFLLASLLGAALASDVYCEVCEFLVKEVTKLIDNNKTEKEILDAFDKMCSKLPKSLSEECQEVVDTYGSSILSILLEEVSPELVCSMLHLCSG

SEQ ID NO: 1793 - DNA, 42 bp, Human immunodeficiency virus
  source 1..42: mol_type = genomic DNA
tatggcaggaaaaagcggaggcaaaggcgccgccccccccag

SEQ ID NO: 1794 - protein, 14 aa, Human immunodeficiency virus
YGRKKRRQRRRPPQ

SEQ ID NO: 1795 - DNA, 102 bp, synthetic construct
  source 1..102: mol_type = other DNA
tccgtaatcgacgccttacagtataagctggagggaaccaccagattgacaaggaaacgagggcttaagcttgctactgcactatccctgagcaataaattt

SEQ ID NO: 1796 - protein, 34 aa, synthetic construct
SVIDALQYKLEGTTRLTRKRGLKLATALSLSNKF

SEQ ID NO: 1797 - DNA, 54 bp, synthetic construct
  source 1..54: mol_type = other DNA
ctacggaagctgcggaagcggctactgctgcggaaacttcggaaacggctactg

SEQ ID NO: 1798 - protein, 18 aa, synthetic construct
LRKLRKRLLLRKLRKRLL

SEQ ID NO: 1799 - DNA, 15 bp, synthetic construct
  source 1..15: mol_type = other DNA
aagtttgaaagacag

SEQ ID NO: 1800 - protein, 5 aa, synthetic construct
KFERQ

SEQ ID NO: 1801 - DNA, 63 bp, synthetic construct
  source 1..63: mol_type = other DNA
atgaaggagaccgctgctgcaaagttcgagagacagcatatggatagctccacaagcgccgca

SEQ ID NO: 1802 - protein, 21 aa, synthetic construct
MKETAAAKFERQHMDSSTSAA

SEQ ID NO: 1803 - DNA, 15 bp, synthetic construct
  source 1..15: mol_type = other DNA
cagaaaatcctggat

SEQ ID NO: 1804 - protein, 5 aa, synthetic construct
QKILD

SEQ ID NO: 1805 - DNA, 15 bp, synthetic construct
  source 1..15: mol_type = other DNA
cagagattcttcgag

SEQ ID NO: 1806 - protein, 5 aa, synthetic construct
QRFFE

SEQ ID NO: 1807 - DNA, 45 bp, synthetic construct
  source 1..45: mol_type = other DNA
aagtttgaaagacagcagaaaatcctggatcagagattcttcgag

SEQ ID NO: 1808 - protein, 15 aa, synthetic construct
KFERQQKILDQRFFE

SEQ ID NO: 1809 - DNA, 3941 bp, synthetic construct
  source 1..3941: mol_type = other DNA
ctgcgcgctcgctcgctcactgaggccgcccgggcaaagcccgggcgtcgggcgacctttggtcgcccggcctcagtgagcgagcgagcgcgcagagagggagtggccaactccatcactaggggttccttgtagttaatgattaacccgccatgctacttatctaccagggtaatggggatcctctagaactatagctagtcgacattgattattgactagttattaatagtaatcaattacggggtcattagttcatagcccatatatggagttccgcgttacataacttacggtaaatggcccgcctggctgaccgcccaacgacccccgcccattgacgtcaataatgacgtatgttcccatagtaacgccaatagggactttccattgacgtcaatgggtggagtatttacggtaaactgcccacttggcagtacatcaagtgtatcatatgccaagtacgccccctattgacgtcaatgacggtaaatggcccgcctggcattatgcccagtacatgaccttatgggactttcctacttggcagtacatctacgtattagtcatcgctattaccatgtcgaggccacgttctgcttcactctccccatctcccccccctccccacccccaattttgtatttatttattttttaattattttgtgcagcgatgggggcggggggggggggcgcgcgccaggcggggcggggcggggcgaggggcggggcggggcgaggcggagaggtgcggcggcagccaatcagagcggcgcgctccgaaagtttccttttatggcgaggcggcggcggcggcggccctataaaaagcgaagcgcgcggcgggcgggagcaagcttcgtttagtgaaccgtcagatcgcctggagacgccatccacgctgttttgacctccatagaagacaccgggaccgatccagcctccgcggattcgaatcccggccgggaacggtgcattggaacgcggattccccgtgccaagagtgacgtaagtaccgcctatagagtctataggcccacaaaaaatgctttcttcttttaatatacttttttgtttatcttatttctaatactttccctaatctctttctttcagggcaataatgatacaatgtatcatgcctctttgcaccattctaaagaataacagtgataatttctgggttaaggcaatagcaatatttctgcatataaatatttctgcatataaattgtaactgatgtaagaggtttcatattgctaatagcagctacaatccagctaccattctgcttttattttatggttgggataaggctggattattctgagtccaagctaggcccttttgctaatcatgttcatacctcttatcttcctcccacagctcctgggcaacgtgctggtctgtgtgctggcccatcactttggcaaagaattgggattcgaaccggtgccgccaccatggaattcagcagccccagcagagaggaatgccccaagcctctgagccgggtgtcaatcatggccggatctctgacaggactgctgctgcttcaggccgtgtcttgggcttctggcatgaaggagaccgctgctgcaaagttcgagagacagcatatggatagctccacaagcgccgcagctagaccttgcatccccaagagcttcggctacagcagcgtcgtgtgcgtgtgcaatgccacctactgcgacagcttcgaccctcctacctttcctgctctgggcaccttcagcagatacgagagcaccagatccggcagacggatggaactgagcatgggacccatccaggccaatcacacaggcactggcctgctgctgacactgcagcctgagcagaaattccagaaagtgaaaggcttcggcggagccatgacagatgccgccgctctgaatatcctggctctgtctccaccagctcagaacctgctgctcaagagctacttcagcgaggaaggcatcggctacaacatcatcagagtgcccatggccagctgcgacttcagcatcaggacctacacctacgccgacacacccgacgatttccagctgcacaacttcagcctgcctgaagaggacaccaagctgaagatccctctgatccacagagccctgcagctggcacaaagacccgtgtcactgctggcctctccatggacatctcccacctggctgaaaacaaatggcgccgtgaatggcaagggcagcctgaaaggccaacctggcgacatctaccaccagacctgggccagatacttcgtgaagttcctggacgcctatgccgagcacaagctgcagttttgggccgtgacagccgagaacgaaccttctgctggactgctgagcggctacccctttcagtgcctgggctttacacccgagcaccagcgggactttatcgcccgtgatctgggacccacactggccaatagcacccaccataatgtgcggctgctgatgctggacgaccagagactgcttctgccccactgggctaaagtggtgctgacagatcctgaggccgccaaatacgtgcacggaatcgccgtgcactggtatctggactttctggcccctgccaaggccacactgggagagacacacagactgttccccaacaccatgctgttcgccagcgaagcctgtgtgggcagcaagttttgggaacagagcgtgcggctcggcagctgggatagaggcatgcagtacagccacagcatcatcaccaacctgctgtaccacgtcgtcggctggaccgactggaatctggccctgaatcctgaaggcggccctaactgggtccgaaacttcgtggacagccccatcatcgtggacatcaccaaggacaccttctacaagcagcccatgttctaccacctgggacacttcagcaagttcatccccgagggctctcagcgcgttggactggtggcttcccagaagaacgatctggacgccgtggctctgatgcaccctgatggatctgctgtggtggtggtcctgaaccgcagcagcaaagatgtgcccctgaccatcaaggatcccgccgtgggattcctggaaacaatcagccctggctactccatccacacctacctgtggcgtagacagagaaagaggcgagagggcagaggaagtcttctaacatgcggtgacgtggaggagaatcccggccctatgtacgccctcttcctcctggccagcctcctgggcgcggctctagccgtgaaagagatgcccatgcagactctggtccccgccaaagtggcctccaagaatgtcatccctgccctggaactggtggagcccattaagaagcacgaggtcccagcaaagtctgatgtttactgtgaggtgtgtgaattcctggtgaaggaggtgaccaagctgattgacaacaacaagactgagaaagaaatactcgacgcttttgacaaaatgtgctcgaagctgccgaagtccctgtcggaagagtgccaggaggtggtggacacgtacggcagctccatcctgtccatcctgctggaggaggtcagccctgagctggtgtgcagcatgctgcacctctgctctggctagtaactcgaggacggggtgaactacgcctgaggatccgatctttttccctctgccaaaaattatggggacatcatgaagccccttgagcatctgacttctggctaataaaggaaatttattttcattgcaatagtgtgttggaattttttgtgtctctcactcggcctaggtagataagtagcatggcgggttaatcattaactacaaggaacccctagtgatggagttggccactccctctctgcgcgctcgctcgctcactgaggccgggcgaccaaaggtcgcccgacgcccgggctttgcccgggcggcctcagtgagcgagcgagcgcgcag

SEQ ID NO: 1810 - DNA, 3977 bp, synthetic construct
  source 1..3977: mol_type = other DNA
ctgcgcgctcgctcgctcactgaggccgcccgggcaaagcccgggcgtcgggcgacctttggtcgcccggcctcagtgagcgagcgagcgcgcagagagggagtggccaactccatcactaggggttccttgtagttaatgattaacccgccatgctacttatctaccagggtaatggggatcctctagaactatagctagtcgacattgattattgactagttattaatagtaatcaattacggggtcattagttcatagcccatatatggagttccgcgttacataacttacggtaaatggcccgcctggctgaccgcccaacgacccccgcccattgacgtcaataatgacgtatgttcccatagtaacgccaatagggactttccattgacgtcaatgggtggagtatttacggtaaactgcccacttggcagtacatcaagtgtatcatatgccaagtacgccccctattgacgtcaatgacggtaaatggcccgcctggcattatgcccagtacatgaccttatgggactttcctacttggcagtacatctacgtattagtcatcgctattaccatgtcgaggccacgttctgcttcactctccccatctcccccccctccccacccccaattttgtatttatttattttttaattattttgtgcagcgatgggggcggggggggggggcgcgcgccaggcggggcggggcggggcgaggggcggggcggggcgaggcggagaggtgcggcggcagccaatcagagcggcgcgctccgaaagtttccttttatggcgaggcggcggcggcggcggccctataaaaagcgaagcgcgcggcgggcgggagcaagcttcgtttagtgaaccgtcagatcgcctggagacgccatccacgctgttttgacctccatagaagacaccgggaccgatccagcctccgcggattcgaatcccggccgggaacggtgcattggaacgcggattccccgtgccaagagtgacgtaagtaccgcctatagagtctataggcccacaaaaaatgctttcttcttttaatatacttttttgtttatcttatttctaatactttccctaatctctttctttcagggcaataatgatacaatgtatcatgcctctttgcaccattctaaagaataacagtgataatttctgggttaaggcaatagcaatatttctgcatataaatatttctgcatataaattgtaactgatgtaagaggtttcatattgctaatagcagctacaatccagctaccattctgcttttattttatggttgggataaggctggattattctgagtccaagctaggcccttttgctaatcatgttcatacctcttatcttcctcccacagctcctgggcaacgtgctggtctgtgtgctggcccatcactttggcaaagaattgggattcgaaccggtgccgccaccatggaattcagcagccccagcagagaggaatgccccaagcctctgagccgggtgtcaatcatggccggatctctgacaggactgctgctgcttcaggccgtgtcttgggcttctggcgctagaccttgcatccccaagagcttcggctacagcagcgtcgtgtgcgtgtgcaatgccacctactgcgacagcttcgaccctcctacctttcctgctctgggcaccttcagcagatacgagagcaccagatccggcagacggatggaactgagcatgggacccatccaggccaatcacacaggcactggcctgctgctgacactgcagcctgagcagaaattccagaaagtgaaaggcttcggcggagccatgacagatgccgccgctctgaatatcctggctctgtctccaccagctcagaacctgctgctcaagagctacttcagcgaggaaggcatcggctacaacatcatcagagtgcccatggccagctgcgacttcagcatcaggacctacacctacgccgacacacccgacgatttccagctgcacaacttcagcctgcctgaagaggacaccaagctgaagatccctctgatccacagagccctgcagctggcacaaagacccgtgtcactgctggcctctccatggacatctcccacctggctgaaaacaaatggcgccgtgaatggcaagggcagcctgaaaggccaacctggcgacatctaccaccagacctgggccagatacttcgtgaagttcctggacgcctatgccgagcacaagctgcagttttgggccgtgacagccgagaacgaaccttctgctggactgctgagcggctacccctttcagtgcctgggctttacacccgagcaccagcgggactttatcgcccgtgatctgggacccacactggccaatagcacccaccataatgtgcggctgctgatgctggacgaccagagactgcttctgccccactgggctaaagtggtgctgacagatcctgaggccgccaaatacgtgcacggaatcgccgtgcactggtatctggactttctggcccctgccaaggccacactgggagagacacacagactgttccccaacaccatgctgttcgccagcgaagcctgtgtgggcagcaagttttgggaacagagcgtgcggctcggcagctgggatagaggcatgcagtacagccacagcatcatcaccaacctgctgtaccacgtcgtcggctggaccgactggaatctggccctgaatcctgaaggcggccctaactgggtccgaaacttcgtggacagccccatcatcgtggacatcaccaaggacaccttctacaagcagcccatgttctaccacctgggacacttcagcaagttcatccccgagggctctcagcgcgttggactggtggcttcccagaagaacgatctggacgccgtggctctgatgcaccctgatggatctgctgtggtggtggtcctgaaccgcagcagcaaagatgtgcccctgaccatcaaggatcccgccgtgggattcctggaaacaatcagccctggctactccatccacacctacctgtggcgtagacagggaggggggggttcgggtggcggcggaagtgggggcggtggttctctacggaagctgcggaagcggctactgctgcggaaacttcggaaacggctactgagaaagaggcgagagggcagaggaagtcttctaacatgcggtgacgtggaggagaatcccggccctatgtacgccctcttcctcctggccagcctcctgggcgcggctctagccgtgaaagagatgcccatgcagactctggtccccgccaaagtggcctccaagaatgtcatccctgccctggaactggtggagcccattaagaagcacgaggtcccagcaaagtctgatgtttactgtgaggtgtgtgaattcctggtgaaggaggtgaccaagctgattgacaacaacaagactgagaaagaaatactcgacgcttttgacaaaatgtgctcgaagctgccgaagtccctgtcggaagagtgccaggaggtggtggacacgtacggcagctccatcctgtccatcctgctggaggaggtcagccctgagctggtgtgcagcatgctgcacctctgctctggctagtaactcgaggacggggtgaactacgcctgaggatccgatctttttccctctgccaaaaattatggggacatcatgaagccccttgagcatctgacttctggctaataaaggaaatttattttcattgcaatagtgtgttggaattttttgtgtctctcactcggcctaggtagataagtagcatggcgggttaatcattaactacaaggaacccctagtgatggagttggccactccctctctgcgcgctcgctcgctcactgaggccgggcgaccaaaggtcgcccgacgcccgggctttgcccgggcggcctcagtgagcgagcgagcgcgcag

SEQ ID NO: 1811 - DNA, 4040 bp, synthetic construct
  source 1..4040: mol_type = other DNA
ctgcgcgctcgctcgctcactgaggccgcccgggcaaagcccgggcgtcgggcgacctttggtcgcccggcctcagtgagcgagcgagcgcgcagagagggagtggccaactccatcactaggggttccttgtagttaatgattaacccgccatgctacttatctaccagggtaatggggatcctctagaactatagctagtcgacattgattattgactagttattaatagtaatcaattacggggtcattagttcatagcccatatatggagttccgcgttacataacttacggtaaatggcccgcctggctgaccgcccaacgacccccgcccattgacgtcaataatgacgtatgttcccatagtaacgccaatagggactttccattgacgtcaatgggtggagtatttacggtaaactgcccacttggcagtacatcaagtgtatcatatgccaagtacgccccctattgacgtcaatgacggtaaatggcccgcctggcattatgcccagtacatgaccttatgggactttcctacttggcagtacatctacgtattagtcatcgctattaccatgtcgaggccacgttctgcttcactctccccatctcccccccctccccacccccaattttgtatttatttattttttaattattttgtgcagcgatgggggcggggggggggggcgcgcgccaggcggggcggggcggggcgaggggcggggcggggcgaggcggagaggtgcggcggcagccaatcagagcggcgcgctccgaaagtttccttttatggcgaggcggcggcggcggcggccctataaaaagcgaagcgcgcggcgggcgggagcaagcttcgtttagtgaaccgtcagatcgcctggagacgccatccacgctgttttgacctccatagaagacaccgggaccgatccagcctccgcggattcgaatcccggccgggaacggtgcattggaacgcggattccccgtgccaagagtgacgtaagtaccgcctatagagtctataggcccacaaaaaatgctttcttcttttaatatacttttttgtttatcttatttctaatactttccctaatctctttctttcagggcaataatgatacaatgtatcatgcctctttgcaccattctaaagaataacagtgataatttctgggttaaggcaatagcaatatttctgcatataaatatttctgcatataaattgtaactgatgtaagaggtttcatattgctaatagcagctacaatccagctaccattctgcttttattttatggttgggataaggctggattattctgagtccaagctaggcccttttgctaatcatgttcatacctcttatcttcctcccacagctcctgggcaacgtgctggtctgtgtgctggcccatcactttggcaaagaattgggattcgaaccggtgccgccaccatggaattcagcagccccagcagagaggaatgccccaagcctctgagccgggtgtcaatcatggccggatctctgacaggactgctgctgcttcaggccgtgtcttgggcttctggcatgaaggagaccgctgctgcaaagttcgagagacagcatatggatagctccacaagcgccgcagctagaccttgcatccccaagagcttcggctacagcagcgtcgtgtgcgtgtgcaatgccacctactgcgacagcttcgaccctcctacctttcctgctctgggcaccttcagcagatacgagagcaccagatccggcagacggatggaactgagcatgggacccatccaggccaatcacacaggcactggcctgctgctgacactgcagcctgagcagaaattccagaaagtgaaaggcttcggcggagccatgacagatgccgccgctctgaatatcctggctctgtctccaccagctcagaacctgctgctcaagagctacttcagcgaggaaggcatcggctacaacatcatcagagtgcccatggccagctgcgacttcagcatcaggacctacacctacgccgacacacccgacgatttccagctgcacaacttcagcctgcctgaagaggacaccaagctgaagatccctctgatccacagagccctgcagctggcacaaagacccgtgtcactgctggcctctccatggacatctcccacctggctgaaaacaaatggcgccgtgaatggcaagggcagcctgaaaggccaacctggcgacatctaccaccagacctgggccagatacttcgtgaagttcctggacgcctatgccgagcacaagctgcagttttgggccgtgacagccgagaacgaaccttctgctggactgctgagcggctacccctttcagtgcctgggctttacacccgagcaccagcgggactttatcgcccgtgatctgggacccacactggccaatagcacccaccataatgtgcggctgctgatgctggacgaccagagactgcttctgccccactgggctaaagtggtgctgacagatcctgaggccgccaaatacgtgcacggaatcgccgtgcactggtatctggactttctggcccctgccaaggccacactgggagagacacacagactgttccccaacaccatgctgttcgccagcgaagcctgtgtgggcagcaagttttgggaacagagcgtgcggctcggcagctgggatagaggcatgcagtacagccacagcatcatcaccaacctgctgtaccacgtcgtcggctggaccgactggaatctggccctgaatcctgaaggcggccctaactgggtccgaaacttcgtggacagccccatcatcgtggacatcaccaaggacaccttctacaagcagcccatgttctaccacctgggacacttcagcaagttcatccccgagggctctcagcgcgttggactggtggcttcccagaagaacgatctggacgccgtggctctgatgcaccctgatggatctgctgtggtggtggtcctgaaccgcagcagcaaagatgtgcccctgaccatcaaggatcccgccgtgggattcctggaaacaatcagccctggctactccatccacacctacctgtggcgtagacagggaggggggggttcgggtggcggcggaagtgggggcggtggttctctacggaagctgcggaagcggctactgctgcggaaacttcggaaacggctactgagaaagaggcgagagggcagaggaagtcttctaacatgcggtgacgtggaggagaatcccggccctatgtacgccctcttcctcctggccagcctcctgggcgcggctctagccgtgaaagagatgcccatgcagactctggtccccgccaaagtggcctccaagaatgtcatccctgccctggaactggtggagcccattaagaagcacgaggtcccagcaaagtctgatgtttactgtgaggtgtgtgaattcctggtgaaggaggtgaccaagctgattgacaacaacaagactgagaaagaaatactcgacgcttttgacaaaatgtgctcgaagctgccgaagtccctgtcggaagagtgccaggaggtggtggacacgtacggcagctccatcctgtccatcctgctggaggaggtcagccctgagctggtgtgcagcatgctgcacctctgctctggctagtaactcgaggacggggtgaactacgcctgaggatccgatctttttccctctgccaaaaattatggggacatcatgaagccccttgagcatctgacttctggctaataaaggaaatttattttcattgcaatagtgtgttggaattttttgtgtctctcactcggcctaggtagataagtagcatggcgggttaatcattaactacaaggaacccctagtgatggagttggccactccctctctgcgcgctcgctcgctcactgaggccgggcgaccaaaggtcgcccgacgcccgggctttgcccgggcggcctcagtgagcgagcgagcgcgcag

SEQ ID NO: 1812 - DNA, 3413 bp, synthetic construct
  source 1..3413: mol_type = other DNA
ctgcgcgctcgctcgctcactgaggccgcccgggcaaagcccgggcgtcgggcgacctttggtcgcccggcctcagtgagcgagcgagcgcgcagagagggagtggccaactccatcactaggggttccttgtagttaatgattaacccgccatgctacttatctaccagggtaatggggatcctctagaactatagctagtcgacattgattattgactagttattaatagtaatcaattacggggtcattagttcatagcccatatatggagttccgcgttacataacttacggtaaatggcccgcctggctgaccgcccaacgacccccgcccattgacgtcaataatgacgtatgttcccatagtaacgccaatagggactttccattgacgtcaatgggtggagtatttacggtaaactgcccacttggcagtacatcaagtgtatcatatgccaagtacgccccctattgacgtcaatgacggtaaatggcccgcctggcattatgcccagtacatgaccttatgggactttcctacttggcagtacatctacgtattagtcatcgctattaccatgtcgaggccacgttctgcttcactctccccatctcccccccctccccacccccaattttgtatttatttattttttaattattttgtgcagcgatgggggcggggggggggggcgcgcgccaggcggggcggggcggggcgaggggcggggcggggcgaggcggagaggtgcggcggcagccaatcagagcggcgcgctccgaaagtttccttttatggcgaggcggcggcggcggcggccctataaaaagcgaagcgcgcggcgggcgggagcaagcttcgtttagtgaaccgtcagatcgcctggagacgccatccacgctgttttgacctccatagaagacaccgggaccgatccagcctccgcggattcgaatcccggccgggaacggtgcattggaacgcggattccccgtgccaagagtgacgtaagtaccgcctatagagtctataggcccacaaaaaatgctttcttcttttaatatacttttttgtttatcttatttctaatactttccctaatctctttctttcagggcaataatgatacaatgtatcatgcctctttgcaccattctaaagaataacagtgataatttctgggttaaggcaatagcaatatttctgcatataaatatttctgcatataaattgtaactgatgtaagaggtttcatattgctaatagcagctacaatccagctaccattctgcttttattttatggttgggataaggctggattattctgagtccaagctaggcccttttgctaatcatgttcatacctcttatcttcctcccacagctcctgggcaacgtgctggtctgtgtgctggcccatcactttggcaaagaattgggattcgaaccggtgccgccaccatggaattctctagcccatctagagaggaatgtcctaagcctctgtcaagagtgtccatcatggccggcagcctgacaggcctgctgctgctgcaggccgtgtcctgggccagtggagcccggccctgcatccctaagtccttcggctattctagcgtggtctgcgtgtgtaatgccacttactgcgacagcttcgaccctcctaccttccccgcccttggaacattcagcagatacgagagcaccagaagcggcagaagaatggaactgagcatgggcccaatccaggccaaccacaccggcaccggcctgctgctgacactgcaacctgagcagaagttccagaaggtgaagggatttggaggcgccatgaccgacgctgctgctctgaacatcctggccctctccccacctgctcagaacctgctgcttaaaagctacttcagcgaggaaggcatcggctataacatcatcagagtgcccatggccagctgcgacttcagcatcagaacatacacctacgccgatacacctgatgacttccaactgcacaacttcagcctgcctgaagaggacacaaagctgaaaatccccctgatccaccgggccctgcagctggcccagagacctgtgagcctgctggcctctccttggacaagccccacctggctgaagaccaatggagctgtgaacggcaagggcagcctgaagggccagcccggcgacatctaccaccaaacctgggctcgctacttcgtgaaattcctggacgcctacgctgagcataagctgcaattttgggccgttacagccgagaacgagccttctgccggcctgctgtctggatatcctttccagtgcctgggcttcacccctgagcaccagagagactttatcgccagagatctggggcctaccctggctaacagcacacaccacaacgtgcggctgctgatgctggacgatcagaggctgctgctcccccactgggccaaggtggtgctgacagatccggaggccgccaaatacgtgcacggcatcgccgtccactggtacctggatttcctggcccctgccaaggccaccctgggcgagacacatagactgtttcctaataccatgctgttcgccagcgaggcctgcgtgggcagcaagttctgggaacagagcgtgcggctgggcagctgggacagaggaatgcagtacagccacagcatcattaccaacctgctgtaccacgtggtgggctggaccgactggaacctggccctgaaccccgaaggcggccccaactgggtgcggaacttcgtggactctcctatcatcgtggatattaccaaggataccttttacaagcagcctatgttctaccacctgggccacttcagcaagttcatccctgagggctctcagcgggtgggcctggtggcctctcagaaaaacgacctggatgccgttgccctgatgcaccccgacggcagcgccgtggtggtcgtcctgaatagaagctccaaggacgtgcctctgaccatcaaggaccccgctgtgggatttctggaaaccatcagccctggctacagcatccacacctacctgtggcggcggcagtagtaactcgaggacggggtgaactacgcctgaggatccgatctttttccctctgccaaaaattatggggacatcatgaagccccttgagcatctgacttctggctaataaaggaaatttattttcattgcaatagtgtgttggaattttttgtgtctctcactcggcctaggtagataagtagcatggcgggttaatcattaactacaaggaacccctagtgatggagttggccactccctctctgcgcgctcgctcgctcactgaggccgggcgaccaaaggtcgcccgacgcccgggctttgcccgggcggcctcagtgagcgagcgagcgcgcag

SEQ ID NO: 1813 - DNA, 3375 bp, synthetic construct
  source 1..3375: mol_type = other DNA
ctgcgcgctcgctcgctcactgaggccgcccgggcaaagcccgggcgtcgggcgacctttggtcgcccggcctcagtgagcgagcgagcgcgcagagagggagtggccaactccatcactaggggttccttgtagttaatgattaacccgccatgctacttatctaccagggtaatggggatcctctagaactatagctagtcgacataacgcgtgcatgcgtgaggctccggtgcccgtcagtgggcagagcgcacatcgcccacagtccccgagaagttggggggaggggtcggcaattgaaccggtgcctagagaaggtggcgcggggtaaactgggaaagtgatgtcgtgtactggctccgcctttttcccgagggtgggggagaaccgtatataagtgcagtagtcgccgtgaacgttctttttcgcaacgggtttgccgccagaacacaggtaagtgccgtgtgtggttcccgcgggcctggcctctttacgggttatggcccttgcgtgccttgaattacttccacctggctgcagtacgtgattcttgatcccgagcttcgggttggaagtgggtgggagagttcgaggccttgcgcttaaggagccccttcgcctcgtgcttgagttgaggcctggcctgggcgctggggccgccgcgtgcgaatctggtggcaccttcgcgcctgtctcgctgctttcgataagtctctagccatttaaaatttttgatgacctgctgcgacgctttttttctggcaagatagtcttgtaaatgcgggccaagatctgcacactggtatttcggtttttggggccgcgggcggcgacggggcccgtgcgtcccagcgcacatgttcggcgaggcggggcctgcgagcgcggccaccgagaatcggacgggggtagtctcaagctggccggcctgctctggtgcctggcctcgcgccgccgtgtatcgccccgccctgggcggcaaggctggcccggtcggcaccagttgcgtgagcggaaagatggccgcttcccggccctgctgcagggagctcaaaatggaggacgcggcgctcgggagagcgggcgggtgagtcacccacacaaaggaaaagggcctttccgtcctcagccgtcgcttcatgtgactccacggagtaccgggcgccgtccaggcacctcgattagttctcgagcttttggagtacgtcgtctttaggttggggggaggggttttatgcgatggagtttccccacactgagtgggtggagactgaagttaggccagcttggcacttgatgtaattctccttggaatttgccctttttgagtttggatcttggttcattctcaagcctcagacagtggttcaaagtttttttcttccatttcaggtgtcgtgagggattcgaaccggtgccgccaccatggaattctctagcccatctagagaggaatgtcctaagcctctgtcaagagtgtccatcatggccggcagcctgacaggcctgctgctgctgcaggccgtgtcctgggccagtggagcccggccctgcatccctaagtccttcggctattctagcgtggtctgcgtgtgtaatgccacttactgcgacagcttcgaccctcctaccttccccgcccttggaacattcagcagatacgagagcaccagaagcggcagaagaatggaactgagcatgggcccaatccaggccaaccacaccggcaccggcctgctgctgacactgcaacctgagcagaagttccagaaggtgaagggatttggaggcgccatgaccgacgctgctgctctgaacatcctggccctctccccacctgctcagaacctgctgcttaaaagctacttcagcgaggaaggcatcggctataacatcatcagagtgcccatggccagctgcgacttcagcatcagaacatacacctacgccgatacacctgatgacttccaactgcacaacttcagcctgcctgaagaggacacaaagctgaaaatccccctgatccaccgggccctgcagctggcccagagacctgtgagcctgctggcctctccttggacaagccccacctggctgaagaccaatggagctgtgaacggcaagggcagcctgaagggccagcccggcgacatctaccaccaaacctgggctcgctacttcgtgaaattcctggacgcctacgctgagcataagctgcaattttgggccgttacagccgagaacgagccttctgccggcctgctgtctggatatcctttccagtgcctgggcttcacccctgagcaccagagagactttatcgccagagatctggggcctaccctggctaacagcacacaccacaacgtgcggctgctgatgctggacgatcagaggctgctgctcccccactgggccaaggtggtgctgacagatccggaggccgccaaatacgtgcacggcatcgccgtccactggtacctggatttcctggcccctgccaaggccaccctgggcgagacacatagactgtttcctaataccatgctgttcgccagcgaggcctgcgtgggcagcaagttctgggaacagagcgtgcggctgggcagctgggacagaggaatgcagtacagccacagcatcattaccaacctgctgtaccacgtggtgggctggaccgactggaacctggccctgaaccccgaaggcggccccaactgggtgcggaacttcgtggactctcctatcatcgtggatattaccaaggataccttttacaagcagcctatgttctaccacctgggccacttcagcaagttcatccctgagggctctcagcgggtgggcctggtggcctctcagaaaaacgacctggatgccgttgccctgatgcaccccgacggcagcgccgtggtggtcgtcctgaatagaagctccaaggacgtgcctctgaccatcaaggaccccgctgtgggatttctggaaaccatcagccctggctacagcatccacacctacctgtggcggcggcagtagtaactcgaggacggggtgaactacgcctgaggatccgatctttttccctctgccaaaaattatggggacatcatgaagccccttgagcatctgacttctggctaataaaggaaatttattttcattgcaatagtgtgttggaattttttgtgtctctcactcggcctaggtagataagtagcatggcgggttaatcattaactacaaggaacccctagtgatggagttggccactccctctctgcgcgctcgctcgctcactgaggccgggcgaccaaaggtcgcccgacgcccgggctttgcccgggcggcctcagtgagcgagcgagcgcgcag

SEQ ID NO: 1814 - DNA, 3360 bp, synthetic construct
  source 1..3360: mol_type = other DNA
ctgcgcgctcgctcgctcactgaggccgcccgggcaaagcccgggcgtcgggcgacctttggtcgcccggcctcagtgagcgagcgagcgcgcagagagggagtggccaactccatcactaggggttccttgtagttaatgattaacccgccatgctacttatctaccagggtaatggggatcctctagaactatagctagtcgacataacgcgtgttgacattgattattgactagttattaatagtaatcaattacggggtcattagttcatagcccatatatggagttccgcgttacataacttacggtaaatggcccgcctggctgaccgcccaacgacccccgcccattgacgtcaataatgacgtatgttcccatagtaacgccaatagggactttccattgacgtcaatgggtggagtatttacggtaaactgcccacttggcagtacatcaagtgtatcatatgccaagtacgccccctattgacgtcaatgacggtaaatggcccgcctggcattatgcccagtacatgaccttatgggactttcctacttggcagtacatctacgtattagtcatcgctattaccatggtgatgcggttttggcagtacatcaatgggcgtggatagcggtttgactcacggggatttccaagtctccaccccattgacgtcaatgggagtttgttttggcaccaaaatcaacgggactttccaaaatgtcgtaacaactccgccccattgacgcaaatgggcggtaggcgtgtacggtgggaggtctatataagcagagctcaagcttcgtttagtgaaccgtcagatcgcctggagacgccatccacgctgttttgacctccatagaagacaccgggaccgatccagcctccgcggattcgaatcccggccgggaacggtgcattggaacgcggattccccgtgccaagagtgacgtaagtaccgcctatagagtctataggcccacaaaaaatgctttcttcttttaatatacttttttgtttatcttatttctaatactttccctaatctctttctttcagggcaataatgatacaatgtatcatgcctctttgcaccattctaaagaataacagtgataatttctgggttaaggcaatagcaatatttctgcatataaatatttctgcatataaattgtaactgatgtaagaggtttcatattgctaatagcagctacaatccagctaccattctgcttttattttatggttgggataaggctggattattctgagtccaagctaggcccttttgctaatcatgttcatacctcttatcttcctcccacagctcctgggcaacgtgctggtctgtgtgctggcccatcactttggcaaagaattgggattcgaaccggtgccgccaccatggaattctctagcccatctagagaggaatgtcctaagcctctgtcaagagtgtccatcatggccggcagcctgacaggcctgctgctgctgcaggccgtgtcctgggccagtggagcccggccctgcatccctaagtccttcggctattctagcgtggtctgcgtgtgtaatgccacttactgcgacagcttcgaccctcctaccttccccgcccttggaacattcagcagatacgagagcaccagaagcggcagaagaatggaactgagcatgggcccaatccaggccaaccacaccggcaccggcctgctgctgacactgcaacctgagcagaagttccagaaggtgaagggatttggaggcgccatgaccgacgctgctgctctgaacatcctggccctctccccacctgctcagaacctgctgcttaaaagctacttcagcgaggaaggcatcggctataacatcatcagagtgcccatggccagctgcgacttcagcatcagaacatacacctacgccgatacacctgatgacttccaactgcacaacttcagcctgcctgaagaggacacaaagctgaaaatccccctgatccaccgggccctgcagctggcccagagacctgtgagcctgctggcctctccttggacaagccccacctggctgaagaccaatggagctgtgaacggcaagggcagcctgaagggccagcccggcgacatctaccaccaaacctgggctcgctacttcgtgaaattcctggacgcctacgctgagcataagctgcaattttgggccgttacagccgagaacgagccttctgccggcctgctgtctggatatcctttccagtgcctgggcttcacccctgagcaccagagagactttatcgccagagatctggggcctaccctggctaacagcacacaccacaacgtgcggctgctgatgctggacgatcagaggctgctgctcccccactgggccaaggtggtgctgacagatccggaggccgccaaatacgtgcacggcatcgccgtccactggtacctggatttcctggcccctgccaaggccaccctgggcgagacacatagactgtttcctaataccatgctgttcgccagcgaggcctgcgtgggcagcaagttctgggaacagagcgtgcggctgggcagctgggacagaggaatgcagtacagccacagcatcattaccaacctgctgtaccacgtggtgggctggaccgactggaacctggccctgaaccccgaaggcggccccaactgggtgcggaacttcgtggactctcctatcatcgtggatattaccaaggataccttttacaagcagcctatgttctaccacctgggccacttcagcaagttcatccctgagggctctcagcgggtgggcctggtggcctctcagaaaaacgacctggatgccgttgccctgatgcaccccgacggcagcgccgtggtggtcgtcctgaatagaagctccaaggacgtgcctctgaccatcaaggaccccgctgtgggatttctggaaaccatcagccctggctacagcatccacacctacctgtggcggcggcagtagtaactcgaggacggggtgaactacgcctgaggatccgatctttttccctctgccaaaaattatggggacatcatgaagccccttgagcatctgacttctggctaataaaggaaatttattttcattgcaatagtgtgttggaattttttgtgtctctcactcggcctaggtagataagtagcatggcgggttaatcattaactacaaggaacccctagtgatggagttggccactccctctctgcgcgctcgctcgctcactgaggccgggcgaccaaaggtcgcccgacgcccgggctttgcccgggcggcctcagtgagcgagcgagcgcgcag

SEQ ID NO: 1815 - DNA, 3901 bp, synthetic construct
  source 1..3901: mol_type = other DNA
ctgcgcgctcgctcgctcactgaggccgcccgggcaaagcccgggcgtcgggcgacctttggtcgcccggcctcagtgagcgagcgagcgcgcagagagggagtggccaactccatcactaggggttccttgtagttaatgattaacccgccatgctacttatctaccagggtaatggggatcctctagaactatagctagtcgacataacgcgtctagttattaatagtaatcaattacggggtcattagttcatagcccatatatggagttccgcgttacataacttacggtaaatggcccgcctggctgaccgcccaacgacccccgcccattgacgtcaataatgacgtatgttcccatagtaacgccaatagggactttccattgacgtcaatgggtggagtatttacggtaaactgcccacttggcagtacatcaagtgtatcatatgccaagtacgccccctattgacgtcaatgacggtaaatggcccgcctggcattatgcccagtacatgaccttatgggactttcctacttggcagtacatctacgtattagtcatcgctattaccatggtcgaggtgagccccacgttctgcttcactctccccatctcccccccctccccacccccaattttgtatttatttattttttaattattttgtgcagcgatgggggcggggggggggggggggcgcgcgccaggcggggcggggcggggcgaggggcggggcggggcgaggcggagaggtgcggcggcagccaatcagagcggcgcgctccgaaagtttccttttatggcgaggcggcggcggcggcggccctataaaaagcgaagcgcgcggcgggcgggagtcgctgcgcgctgccttcgccccgtgccccgctccgccgccgcctcgcgccgcccgccccggctctgactgaccgcgttactcccacaggtgagcgggcgggacggcccttctcctccgggctgtaattagcgcttggtttaatgacggcttgtttcttttctgtggctgcgtgaaagccttgaggggctccgggagggccctttgtgcggggggagcggctcggggggtgcgtgcgtgtgtgtgtgcgtggggagcgccgcgtgcggctccgcgctgcccggcggctgtgagcgctgcgggcgcggcgcggggctttgtgcgctccgcagtgtgcgcgaggggagcgcggccgggggcggtgccccgcggtgcggggggggctgcgaggggaacaaaggctgcgtgcggggtgtgtgcgtgggggggtgagcagggggtgtgggcgcgtcggtcgggctgcaaccccccctgcacccccctccccgagttgctgagcacggcccggcttcgggtgcggggctccgtacggggcgtggcgcggggctcgccgtgccgggcggggggtggcggcaggtgggggtgccgggcggggcggggccgcctcgggccggggagggctcgggggaggggcgcggcggcccccggagcgccggcggctgtcgaggcgcggcgagccgcagccattgccttttatggtaatcgtgcgagagggcgcagggacttcctttgtcccaaatctgtgcggagccgaaatctgggaggcgccgccgcaccccctctagcgggcgcggggcgaagcggtgcggcgccggcaggaaggaaatgggcggggagggccttcgtgcgtcgccgcgccgccgtccccttctccctctccagcctcggggctgtccgcggggggacggctgccttcgggggggacggggcagggcggggttcggcttctggcgtgtgaccggcggctctagagcctctgctaaccatgttcatgccttcttctttttcctacagctcctgggcaacgtgctggttattgtgctgtctcatcattttggcaaagaattcgggattcgaaccggtgccgccaccatggaattctctagcccatctagagaggaatgtcctaagcctctgtcaagagtgtccatcatggccggcagcctgacaggcctgctgctgctgcaggccgtgtcctgggccagtggagcccggccctgcatccctaagtccttcggctattctagcgtggtctgcgtgtgtaatgccacttactgcgacagcttcgaccctcctaccttccccgcccttggaacattcagcagatacgagagcaccagaagcggcagaagaatggaactgagcatgggcccaatccaggccaaccacaccggcaccggcctgctgctgacactgcaacctgagcagaagttccagaaggtgaagggatttggaggcgccatgaccgacgctgctgctctgaacatcctggccctctccccacctgctcagaacctgctgcttaaaagctacttcagcgaggaaggcatcggctataacatcatcagagtgcccatggccagctgcgacttcagcatcagaacatacacctacgccgatacacctgatgacttccaactgcacaacttcagcctgcctgaagaggacacaaagctgaaaatccccctgatccaccgggccctgcagctggcccagagacctgtgagcctgctggcctctccttggacaagccccacctggctgaagaccaatggagctgtgaacggcaagggcagcctgaagggccagcccggcgacatctaccaccaaacctgggctcgctacttcgtgaaattcctggacgcctacgctgagcataagctgcaattttgggccgttacagccgagaacgagccttctgccggcctgctgtctggatatcctttccagtgcctgggcttcacccctgagcaccagagagactttatcgccagagatctggggcctaccctggctaacagcacacaccacaacgtgcggctgctgatgctggacgatcagaggctgctgctcccccactgggccaaggtggtgctgacagatccggaggccgccaaatacgtgcacggcatcgccgtccactggtacctggatttcctggcccctgccaaggccaccctgggcgagacacatagactgtttcctaataccatgctgttcgccagcgaggcctgcgtgggcagcaagttctgggaacagagcgtgcggctgggcagctgggacagaggaatgcagtacagccacagcatcattaccaacctgctgtaccacgtggtgggctggaccgactggaacctggccctgaaccccgaaggcggccccaactgggtgcggaacttcgtggactctcctatcatcgtggatattaccaaggataccttttacaagcagcctatgttctaccacctgggccacttcagcaagttcatccctgagggctctcagcgggtgggcctggtggcctctcagaaaaacgacctggatgccgttgccctgatgcaccccgacggcagcgccgtggtggtcgtcctgaatagaagctccaaggacgtgcctctgaccatcaaggaccccgctgtgggatttctggaaaccatcagccctggctacagcatccacacctacctgtggcggcggcagtagtaactcgaggacggggtgaactacgcctgaggatccgatctttttccctctgccaaaaattatggggacatcatgaagccccttgagcatctgacttctggctaataaaggaaatttattttcattgcaatagtgtgttggaattttttgtgtctctcactcggcctaggtagataagtagcatggcgggttaatcattaactacaaggaacccctagtgatggagttggccactccctctctgcgcgctcgctcgctcactgaggccgggcgaccaaaggtcgcccgacgcccgggctttgcccgggcggcctcagtgagcgagcgagcgcgcag

SEQ ID NO: 1816 - DNA, 3413 bp, synthetic construct
  source 1..3413: mol_type = other DNA
ctgcgcgctcgctcgctcactgaggccgcccgggcaaagcccgggcgtcgggcgacctttggtcgcccggcctcagtgagcgagcgagcgcgcagagagggagtggccaactccatcactaggggttccttgtagttaatgattaacccgccatgctacttatctaccagggtaatggggatcctctagaactatagctagtcgacattgattattgactagttattaatagtaatcaattacggggtcattagttcatagcccatatatggagttccgcgttacataacttacggtaaatggcccgcctggctgaccgcccaacgacccccgcccattgacgtcaataatgacgtatgttcccatagtaacgccaatagggactttccattgacgtcaatgggtggagtatttacggtaaactgcccacttggcagtacatcaagtgtatcatatgccaagtacgccccctattgacgtcaatgacggtaaatggcccgcctggcattatgcccagtacatgaccttatgggactttcctacttggcagtacatctacgtattagtcatcgctattaccatgtcgaggccacgttctgcttcactctccccatctcccccccctccccacccccaattttgtatttatttattttttaattattttgtgcagcgatgggggcggggggggggggcgcgcgccaggcggggcggggcggggcgaggggcggggcggggcgaggcggagaggtgcggcggcagccaatcagagcggcgcgctccgaaagtttccttttatggcgaggcggcggcggcggcggccctataaaaagcgaagcgcgcggcgggcgggagcaagcttcgtttagtgaaccgtcagatcgcctggagacgccatccacgctgttttgacctccatagaagacaccgggaccgatccagcctccgcggattcgaatcccggccgggaacggtgcattggaacgcggattccccgtgccaagagtgacgtaagtaccgcctatagagtctataggcccacaaaaaatgctttcttcttttaatatacttttttgtttatcttatttctaatactttccctaatctctttctttcagggcaataatgatacaatgtatcatgcctctttgcaccattctaaagaataacagtgataatttctgggttaaggcaatagcaatatttctgcatataaatatttctgcatataaattgtaactgatgtaagaggtttcatattgctaatagcagctacaatccagctaccattctgcttttattttatggttgggataaggctggattattctgagtccaagctaggcccttttgctaatcatgttcatacctcttatcttcctcccacagctcctgggcaacgtgctggtctgtgtgctggcccatcactttggcaaagaattgggattcgaaccggtgccgccaccatggagttttcaagtccttccagagaggaatgtcccaagcctttgagtagggtaagcatcatggctggcagcctcacaggattgcttctacttcaggcagtgtcgtgggcatcaggtgcccgcccctgcatccctaaaagcttcggctacagctcggtggtgtgtgtctgcaatgccacatactgtgactcctttgaccccccgacctttcctgcccttggtaccttcagccgctatgagagtacacgcagtgggcgacggatggagctgagtatggggcccatccaggctaatcacacgggcacaggcctgctactgaccctgcagccagaacagaagttccagaaagtgaagggatttggaggggccatgacagatgctgctgctctcaacatccttgccctgtcaccccctgcccaaaatttgctacttaaatcgtacttctctgaagaaggaatcggatataacatcatccgggtacccatggccagctgtgacttctccatccgcacctacacctatgcagacacccctgatgatttccagttgcacaacttcagcctcccagaggaagataccaagctcaagatacccctgattcaccgagccctgcagttggcccagcgtcccgtttcactccttgccagcccctggacatcacccacttggctcaagaccaatggagcggtgaatgggaaggggtcactcaagggacagcccggagacatctaccaccagacctgggccagatactttgtgaagttcctggatgcctatgctgagcacaagttacagttctgggcagtgacagctgaaaatgagccttctgctgggctgttgagtggataccccttccagtgcctgggcttcacccctgaacatcagcgagacttcattgcccgtgacctaggtcctaccctcgccaacagtactcaccacaatgtccgcctactcatgctggatgaccaacgcttgctgctgccccactgggcaaaggtggtactgacagacccagaagcagctaaatatgttcatggcattgctgtacattggtacctggactttctggctccagccaaagccaccctaggggagacacaccgcctgttccccaacaccatgctctttgcctcagaggcctgtgtgggctccaagttctgggagcagagtgtgcggctaggctcctgggatcgagggatgcagtacagccacagcatcatcacgaacctcctgtaccatgtggtcggctggaccgactggaaccttgccctgaaccccgaaggaggacccaattgggtgcgtaactttgtcgacagtcccatcattgtagacatcaccaaggacacgttttacaaacagcccatgttctaccaccttggccacttcagcaagttcattcctgagggctcccagagagtggggctggttgccagtcagaagaacgacctggacgcagtggcactgatgcatcccgatggctctgctgttgtggtcgtgctaaaccgctcctctaaggatgtgcctcttaccatcaaggatcctgctgtgggcttcctggagacaatctcacctggctactccattcacacctacctgtggcgtcgccagtagtaactcgaggacggggtgaactacgcctgaggatccgatctttttccctctgccaaaaattatggggacatcatgaagccccttgagcatctgacttctggctaataaaggaaatttattttcattgcaatagtgtgttggaattttttgtgtctctcactcggcctaggtagataagtagcatggcgggttaatcattaactacaaggaacccctagtgatggagttggccactccctctctgcgcgctcgctcgctcactgaggccgggcgaccaaaggtcgcccgacgcccgggctttgcccgggcggcctcagtgagcgagcgagcgcgcag

SEQ ID NO: 1817 - DNA, 3878 bp, synthetic construct
  source 1..3878: mol_type = other DNA
ctgcgcgctcgctcgctcactgaggccgcccgggcaaagcccgggcgtcgggcgacctttggtcgcccggcctcagtgagcgagcgagcgcgcagagagggagtggccaactccatcactaggggttccttgtagttaatgattaacccgccatgctacttatctaccagggtaatggggatcctctagaactatagctagtcgacattgattattgactagttattaatagtaatcaattacggggtcattagttcatagcccatatatggagttccgcgttacataacttacggtaaatggcccgcctggctgaccgcccaacgacccccgcccattgacgtcaataatgacgtatgttcccatagtaacgccaatagggactttccattgacgtcaatgggtggagtatttacggtaaactgcccacttggcagtacatcaagtgtatcatatgccaagtacgccccctattgacgtcaatgacggtaaatggcccgcctggcattatgcccagtacatgaccttatgggactttcctacttggcagtacatctacgtattagtcatcgctattaccatgtcgaggccacgttctgcttcactctccccatctcccccccctccccacccccaattttgtatttatttattttttaattattttgtgcagcgatgggggcggggggggggggcgcgcgccaggcggggcggggcggggcgaggggcggggcggggcgaggcggagaggtgcggcggcagccaatcagagcggcgcgctccgaaagtttccttttatggcgaggcggcggcggcggcggccctataaaaagcgaagcgcgcggcgggcgggagcaagcttcgtttagtgaaccgtcagatcgcctggagacgccatccacgctgttttgacctccatagaagacaccgggaccgatccagcctccgcggattcgaatcccggccgggaacggtgcattggaacgcggattccccgtgccaagagtgacgtaagtaccgcctatagagtctataggcccacaaaaaatgctttcttcttttaatatacttttttgtttatcttatttctaatactttccctaatctctttctttcagggcaataatgatacaatgtatcatgcctctttgcaccattctaaagaataacagtgataatttctgggttaaggcaatagcaatatttctgcatataaatatttctgcatataaattgtaactgatgtaagaggtttcatattgctaatagcagctacaatccagctaccattctgcttttattttatggttgggataaggctggattattctgagtccaagctaggcccttttgctaatcatgttcatacctcttatcttcctcccacagctcctgggcaacgtgctggtctgtgtgctggcccatcactttggcaaagaattgggattcgaaccggtgccgccaccatggagttttcaagtccttccagagaggaatgtcccaagcctttgagtagggtaagcatcatggctggcagcctcacaggattgcttctacttcaggcagtgtcgtgggcatcaggtgcccgcccctgcatccctaaaagcttcggctacagctcggtggtgtgtgtctgcaatgccacatactgtgactcctttgaccccccgacctttcctgcccttggtaccttcagccgctatgagagtacacgcagtgggcgacggatggagctgagtatggggcccatccaggctaatcacacgggcacaggcctgctactgaccctgcagccagaacagaagttccagaaagtgaagggatttggaggggccatgacagatgctgctgctctcaacatccttgccctgtcaccccctgcccaaaatttgctacttaaatcgtacttctctgaagaaggaatcggatataacatcatccgggtacccatggccagctgtgacttctccatccgcacctacacctatgcagacacccctgatgatttccagttgcacaacttcagcctcccagaggaagataccaagctcaagatacccctgattcaccgagccctgcagttggcccagcgtcccgtttcactccttgccagcccctggacatcacccacttggctcaagaccaatggagcggtgaatgggaaggggtcactcaagggacagcccggagacatctaccaccagacctgggccagatactttgtgaagttcctggatgcctatgctgagcacaagttacagttctgggcagtgacagctgaaaatgagccttctgctgggctgttgagtggataccccttccagtgcctgggcttcacccctgaacatcagcgagacttcattgcccgtgacctaggtcctaccctcgccaacagtactcaccacaatgtccgcctactcatgctggatgaccaacgcttgctgctgccccactgggcaaaggtggtactgacagacccagaagcagctaaatatgttcatggcattgctgtacattggtacctggactttctggctccagccaaagccaccctaggggagacacaccgcctgttccccaacaccatgctctttgcctcagaggcctgtgtgggctccaagttctgggagcagagtgtgcggctaggctcctgggatcgagggatgcagtacagccacagcatcatcacgaacctcctgtaccatgtggtcggctggaccgactggaaccttgccctgaaccccgaaggaggacccaattgggtgcgtaactttgtcgacagtcccatcattgtagacatcaccaaggacacgttttacaaacagcccatgttctaccaccttggccacttcagcaagttcattcctgagggctcccagagagtggggctggttgccagtcagaagaacgacctggacgcagtggcactgatgcatcccgatggctctgctgttgtggtcgtgctaaaccgctcctctaaggatgtgcctcttaccatcaaggatcctgctgtgggcttcctggagacaatctcacctggctactccattcacacctacctgtggcgtcgccagagaaagaggcgagagggcagaggaagtcttctaacatgcggtgacgtggaggagaatcccggccctatgtacgccctcttcctcctggccagcctcctgggcgcggctctagccgtgaaagagatgcccatgcagactctggtccccgccaaagtggcctccaagaatgtcatccctgccctggaactggtggagcccattaagaagcacgaggtcccagcaaagtctgatgtttactgtgaggtgtgtgaattcctggtgaaggaggtgaccaagctgattgacaacaacaagactgagaaagaaatactcgacgcttttgacaaaatgtgctcgaagctgccgaagtccctgtcggaagagtgccaggaggtggtggacacgtacggcagctccatcctgtccatcctgctggaggaggtcagccctgagctggtgtgcagcatgctgcacctctgctctggctagtaactcgaggacggggtgaactacgcctgaggatccgatctttttccctctgccaaaaattatggggacatcatgaagccccttgagcatctgacttctggctaataaaggaaatttattttcattgcaatagtgtgttggaattttttgtgtctctcactcggcctaggtagataagtagcatggcgggttaatcattaactacaaggaacccctagtgatggagttggccactccctctctgcgcgctcgctcgctcactgaggccgggcgaccaaaggtcgcccgacgcccgggctttgcccgggcggcctcagtgagcgagcgagcgcgcag

SEQ ID NO: 1818 - DNA, 3512 bp, synthetic construct
  source 1..3512: mol_type = other DNA
ctgcgcgctcgctcgctcactgaggccgcccgggcaaagcccgggcgtcgggcgacctttggtcgcccggcctcagtgagcgagcgagcgcgcagagagggagtggccaactccatcactaggggttccttgtagttaatgattaacccgccatgctacttatctaccagggtaatggggatcctctagaactatagctagtcgacattgattattgactagttattaatagtaatcaattacggggtcattagttcatagcccatatatggagttccgcgttacataacttacggtaaatggcccgcctggctgaccgcccaacgacccccgcccattgacgtcaataatgacgtatgttcccatagtaacgccaatagggactttccattgacgtcaatgggtggagtatttacggtaaactgcccacttggcagtacatcaagtgtatcatatgccaagtacgccccctattgacgtcaatgacggtaaatggcccgcctggcattatgcccagtacatgaccttatgggactttcctacttggcagtacatctacgtattagtcatcgctattaccatgtcgaggccacgttctgcttcactctccccatctcccccccctccccacccccaattttgtatttatttattttttaattattttgtgcagcgatgggggcggggggggggggcgcgcgccaggcggggcggggcggggcgaggggcggggcggggcgaggcggagaggtgcggcggcagccaatcagagcggcgcgctccgaaagtttccttttatggcgaggcggcggcggcggcggccctataaaaagcgaagcgcgcggcgggcgggagcaagcttcgtttagtgaaccgtcagatcgcctggagacgccatccacgctgttttgacctccatagaagacaccgggaccgatccagcctccgcggattcgaatcccggccgggaacggtgcattggaacgcggattccccgtgccaagagtgacgtaagtaccgcctatagagtctataggcccacaaaaaatgctttcttcttttaatatacttttttgtttatcttatttctaatactttccctaatctctttctttcagggcaataatgatacaatgtatcatgcctctttgcaccattctaaagaataacagtgataatttctgggttaaggcaatagcaatatttctgcatataaatatttctgcatataaattgtaactgatgtaagaggtttcatattgctaatagcagctacaatccagctaccattctgcttttattttatggttgggataaggctggattattctgagtccaagctaggcccttttgctaatcatgttcatacctcttatcttcctcccacagctcctgggcaacgtgctggtctgtgtgctggcccatcactttggcaaagaattgggattcgaaccggtgccgccaccatggagttttcaagtccttccagagaggaatgtcccaagcctttgagtagggtaagcatcatggctggcagcctcacaggattgcttctacttcaggcagtgtcgtgggcatcaggtgcccgcccctgcatccctaaaagcttcggctacagctcggtggtgtgtgtctgcaatgccacatactgtgactcctttgaccccccgacctttcctgcccttggtaccttcagccgctatgagagtacacgcagtgggcgacggatggagctgagtatggggcccatccaggctaatcacacgggcacaggcctgctactgaccctgcagccagaacagaagttccagaaagtgaagggatttggaggggccatgacagatgctgctgctctcaacatccttgccctgtcaccccctgcccaaaatttgctacttaaatcgtacttctctgaagaaggaatcggatataacatcatccgggtacccatggccagctgtgacttctccatccgcacctacacctatgcagacacccctgatgatttccagttgcacaacttcagcctcccagaggaagataccaagctcaagatacccctgattcaccgagccctgcagttggcccagcgtcccgtttcactccttgccagcccctggacatcacccacttggctcaagaccaatggagcggtgaatgggaaggggtcactcaagggacagcccggagacatctaccaccagacctgggccagatactttgtgaagttcctggatgcctatgctgagcacaagttacagttctgggcagtgacagctgaaaatgagccttctgctgggctgttgagtggataccccttccagtgcctgggcttcacccctgaacatcagcgagacttcattgcccgtgacctaggtcctaccctcgccaacagtactcaccacaatgtccgcctactcatgctggatgaccaacgcttgctgctgccccactgggcaaaggtggtactgacagacccagaagcagctaaatatgttcatggcattgctgtacattggtacctggactttctggctccagccaaagccaccctaggggagacacaccgcctgttccccaacaccatgctctttgcctcagaggcctgtgtgggctccaagttctgggagcagagtgtgcggctaggctcctgggatcgagggatgcagtacagccacagcatcatcacgaacctcctgtaccatgtggtcggctggaccgactggaaccttgccctgaaccccgaaggaggacccaattgggtgcgtaactttgtcgacagtcccatcattgtagacatcaccaaggacacgttttacaaacagcccatgttctaccaccttggccacttcagcaagttcattcctgagggctcccagagagtggggctggttgccagtcagaagaacgacctggacgcagtggcactgatgcatcccgatggctctgctgttgtggtcgtgctaaaccgctcctctaaggatgtgcctcttaccatcaaggatcctgctgtgggcttcctggagacaatctcacctggctactccattcacacctacctgtggcgtcgccagggaggggggggttcgggtggcggcggaagtgggggcggtggttctctacggaagctgcggaagcggctactgctgcggaaacttcggaaacggctactgtagtaactcgaggacggggtgaactacgcctgaggatccgatctttttccctctgccaaaaattatggggacatcatgaagccccttgagcatctgacttctggctaataaaggaaatttattttcattgcaatagtgtgttggaattttttgtgtctctcactcggcctaggtagataagtagcatggcgggttaatcattaactacaaggaacccctagtgatggagttggccactccctctctgcgcgctcgctcgctcactgaggccgggcgaccaaaggtcgcccgacgcccgggctttgcccgggcggcctcagtgagcgagcgagcgcgcag

SEQ ID NO: 1819 - DNA, 3476 bp, synthetic construct
  source 1..3476: mol_type = other DNA
ctgcgcgctcgctcgctcactgaggccgcccgggcaaagcccgggcgtcgggcgacctttggtcgcccggcctcagtgagcgagcgagcgcgcagagagggagtggccaactccatcactaggggttccttgtagttaatgattaacccgccatgctacttatctaccagggtaatggggatcctctagaactatagctagtcgacattgattattgactagttattaatagtaatcaattacggggtcattagttcatagcccatatatggagttccgcgttacataacttacggtaaatggcccgcctggctgaccgcccaacgacccccgcccattgacgtcaataatgacgtatgttcccatagtaacgccaatagggactttccattgacgtcaatgggtggagtatttacggtaaactgcccacttggcagtacatcaagtgtatcatatgccaagtacgccccctattgacgtcaatgacggtaaatggcccgcctggcattatgcccagtacatgaccttatgggactttcctacttggcagtacatctacgtattagtcatcgctattaccatgtcgaggccacgttctgcttcactctccccatctcccccccctccccacccccaattttgtatttatttattttttaattattttgtgcagcgatgggggcggggggggggggcgcgcgccaggcggggcggggcggggcgaggggcggggcggggcgaggcggagaggtgcggcggcagccaatcagagcggcgcgctccgaaagtttccttttatggcgaggcggcggcggcggcggccctataaaaagcgaagcgcgcggcgggcgggagcaagcttcgtttagtgaaccgtcagatcgcctggagacgccatccacgctgttttgacctccatagaagacaccgggaccgatccagcctccgcggattcgaatcccggccgggaacggtgcattggaacgcggattccccgtgccaagagtgacgtaagtaccgcctatagagtctataggcccacaaaaaatgctttcttcttttaatatacttttttgtttatcttatttctaatactttccctaatctctttctttcagggcaataatgatacaatgtatcatgcctctttgcaccattctaaagaataacagtgataatttctgggttaaggcaatagcaatatttctgcatataaatatttctgcatataaattgtaactgatgtaagaggtttcatattgctaatagcagctacaatccagctaccattctgcttttattttatggttgggataaggctggattattctgagtccaagctaggcccttttgctaatcatgttcatacctcttatcttcctcccacagctcctgggcaacgtgctggtctgtgtgctggcccatcactttggcaaagaattgggattcgaaccggtgccgccaccatggagttttcaagtccttccagagaggaatgtcccaagcctttgagtagggtaagcatcatggctggcagcctcacaggattgcttctacttcaggcagtgtcgtgggcatcaggtatgaaggagaccgctgctgcaaagttcgagagacagcatatggatagctccacaagcgccgcagcccgcccctgcatccctaaaagcttcggctacagctcggtggtgtgtgtctgcaatgccacatactgtgactcctttgaccccccgacctttcctgcccttggtaccttcagccgctatgagagtacacgcagtgggcgacggatggagctgagtatggggcccatccaggctaatcacacgggcacaggcctgctactgaccctgcagccagaacagaagttccagaaagtgaagggatttggaggggccatgacagatgctgctgctctcaacatccttgccctgtcaccccctgcccaaaatttgctacttaaatcgtacttctctgaagaaggaatcggatataacatcatccgggtacccatggccagctgtgacttctccatccgcacctacacctatgcagacacccctgatgatttccagttgcacaacttcagcctcccagaggaagataccaagctcaagatacccctgattcaccgagccctgcagttggcccagcgtcccgtttcactccttgccagcccctggacatcacccacttggctcaagaccaatggagcggtgaatgggaaggggtcactcaagggacagcccggagacatctaccaccagacctgggccagatactttgtgaagttcctggatgcctatgctgagcacaagttacagttctgggcagtgacagctgaaaatgagccttctgctgggctgttgagtggataccccttccagtgcctgggcttcacccctgaacatcagcgagacttcattgcccgtgacctaggtcctaccctcgccaacagtactcaccacaatgtccgcctactcatgctggatgaccaacgcttgctgctgccccactgggcaaaggtggtactgacagacccagaagcagctaaatatgttcatggcattgctgtacattggtacctggactttctggctccagccaaagccaccctaggggagacacaccgcctgttccccaacaccatgctctttgcctcagaggcctgtgtgggctccaagttctgggagcagagtgtgcggctaggctcctgggatcgagggatgcagtacagccacagcatcatcacgaacctcctgtaccatgtggtcggctggaccgactggaaccttgccctgaaccccgaaggaggacccaattgggtgcgtaactttgtcgacagtcccatcattgtagacatcaccaaggacacgttttacaaacagcccatgttctaccaccttggccacttcagcaagttcattcctgagggctcccagagagtggggctggttgccagtcagaagaacgacctggacgcagtggcactgatgcatcccgatggctctgctgttgtggtcgtgctaaaccgctcctctaaggatgtgcctcttaccatcaaggatcctgctgtgggcttcctggagacaatctcacctggctactccattcacacctacctgtggcgtcgccagtagtaactcgaggacggggtgaactacgcctgaggatccgatctttttccctctgccaaaaattatggggacatcatgaagccccttgagcatctgacttctggctaataaaggaaatttattttcattgcaatagtgtgttggaattttttgtgtctctcactcggcctaggtagataagtagcatggcgggttaatcattaactacaaggaacccctagtgatggagttggccactccctctctgcgcgctcgctcgctcactgaggccgggcgaccaaaggtcgcccgacgcccgggctttgcccgggcggcctcagtgagcgagcgagcgcgcag

SEQ ID NO: 1820 - DNA, 3428 bp, synthetic construct
  source 1..3428: mol_type = other DNA
ctgcgcgctcgctcgctcactgaggccgcccgggcaaagcccgggcgtcgggcgacctttggtcgcccggcctcagtgagcgagcgagcgcgcagagagggagtggccaactccatcactaggggttccttgtagttaatgattaacccgccatgctacttatctaccagggtaatggggatcctctagaactatagctagtcgacattgattattgactagttattaatagtaatcaattacggggtcattagttcatagcccatatatggagttccgcgttacataacttacggtaaatggcccgcctggctgaccgcccaacgacccccgcccattgacgtcaataatgacgtatgttcccatagtaacgccaatagggactttccattgacgtcaatgggtggagtatttacggtaaactgcccacttggcagtacatcaagtgtatcatatgccaagtacgccccctattgacgtcaatgacggtaaatggcccgcctggcattatgcccagtacatgaccttatgggactttcctacttggcagtacatctacgtattagtcatcgctattaccatgtcgaggccacgttctgcttcactctccccatctcccccccctccccacccccaattttgtatttatttattttttaattattttgtgcagcgatgggggcggggggggggggcgcgcgccaggcggggcggggcggggcgaggggcggggcggggcgaggcggagaggtgcggcggcagccaatcagagcggcgcgctccgaaagtttccttttatggcgaggcggcggcggcggcggccctataaaaagcgaagcgcgcggcgggcgggagcaagcttcgtttagtgaaccgtcagatcgcctggagacgccatccacgctgttttgacctccatagaagacaccgggaccgatccagcctccgcggattcgaatcccggccgggaacggtgcattggaacgcggattccccgtgccaagagtgacgtaagtaccgcctatagagtctataggcccacaaaaaatgctttcttcttttaatatacttttttgtttatcttatttctaatactttccctaatctctttctttcagggcaataatgatacaatgtatcatgcctctttgcaccattctaaagaataacagtgataatttctgggttaaggcaatagcaatatttctgcatataaatatttctgcatataaattgtaactgatgtaagaggtttcatattgctaatagcagctacaatccagctaccattctgcttttattttatggttgggataaggctggattattctgagtccaagctaggcccttttgctaatcatgttcatacctcttatcttcctcccacagctcctgggcaacgtgctggtctgtgtgctggcccatcactttggcaaagaattgggattcgaaccggtgccgccaccatggagttttcaagtccttccagagaggaatgtcccaagcctttgagtagggtaagcatcatggctggcagcctcacaggattgcttctacttcaggcagtgtcgtgggcatcaggtgcccgcccctgcatccctaaaagcttcggctacagctcggtggtgtgtgtctgcaatgccacatactgtgactcctttgaccccccgacctttcctgcccttggtaccttcagccgctatgagagtacacgcagtgggcgacggatggagctgagtatggggcccatccaggctaatcacacgggcacaggcctgctactgaccctgcagccagaacagaagttccagaaagtgaagggatttggaggggccatgacagatgctgctgctctcaacatccttgccctgtcaccccctgcccaaaatttgctacttaaatcgtacttctctgaagaaggaatcggatataacatcatccgggtacccatggccagctgtgacttctccatccgcacctacacctatgcagacacccctgatgatttccagttgcacaacttcagcctcccagaggaagataccaagctcaagatacccctgattcaccgagccctgcagttggcccagcgtcccgtttcactccttgccagcccctggacatcacccacttggctcaagaccaatggagcggtgaatgggaaggggtcactcaagggacagcccggagacatctaccaccagacctgggccagatactttgtgaagttcctggatgcctatgctgagcacaagttacagttctgggcagtgacagctgaaaatgagccttctgctgggctgttgagtggataccccttccagtgcctgggcttcacccctgaacatcagcgagacttcattgcccgtgacctaggtcctaccctcgccaacagtactcaccacaatgtccgcctactcatgctggatgaccaacgcttgctgctgccccactgggcaaaggtggtactgacagacccagaagcagctaaatatgttcatggcattgctgtacattggtacctggactttctggctccagccaaagccaccctaggggagacacaccgcctgttccccaacaccatgctctttgcctcagaggcctgtgtgggctccaagttctgggagcagagtgtgcggctaggctcctgggatcgagggatgcagtacagccacagcatcatcacgaacctcctgtaccatgtggtcggctggaccgactggaaccttgccctgaaccccgaaggaggacccaattgggtgcgtaactttgtcgacagtcccatcattgtagacatcaccaaggacacgttttacaaacagcccatgttctaccaccttggccacttcagcaagttcattcctgagggctcccagagagtggggctggttgccagtcagaagaacgacctggacgcagtggcactgatgcatcccgatggctctgctgttgtggtcgtgctaaaccgctcctctaaggatgtgcctcttaccatcaaggatcctgctgtgggcttcctggagacaatctcacctggctactccattcacacctacctgtggcgtcgccagcagagattcttcgagtagtaactcgaggacggggtgaactacgcctgaggatccgatctttttccctctgccaaaaattatggggacatcatgaagccccttgagcatctgacttctggctaataaaggaaatttattttcattgcaatagtgtgttggaattttttgtgtctctcactcggcctaggtagataagtagcatggcgggttaatcattaactacaaggaacccctagtgatggagttggccactccctctctgcgcgctcgctcgctcactgaggccgggcgaccaaaggtcgcccgacgcccgggctttgcccgggcggcctcagtgagcgagcgagcgcgcag

SEQ ID NO: 1821 - DNA, 3375 bp, synthetic construct
  source 1..3375: mol_type = other DNA
ctgcgcgctcgctcgctcactgaggccgcccgggcaaagcccgggcgtcgggcgacctttggtcgcccggcctcagtgagcgagcgagcgcgcagagagggagtggccaactccatcactaggggttccttgtagttaatgattaacccgccatgctacttatctaccagggtaatggggatcctctagaactatagctagtcgacataacgcgtgcatgcgtgaggctccggtgcccgtcagtgggcagagcgcacatcgcccacagtccccgagaagttggggggaggggtcggcaattgaaccggtgcctagagaaggtggcgcggggtaaactgggaaagtgatgtcgtgtactggctccgcctttttcccgagggtgggggagaaccgtatataagtgcagtagtcgccgtgaacgttctttttcgcaacgggtttgccgccagaacacaggtaagtgccgtgtgtggttcccgcgggcctggcctctttacgggttatggcccttgcgtgccttgaattacttccacctggctgcagtacgtgattcttgatcccgagcttcgggttggaagtgggtgggagagttcgaggccttgcgcttaaggagccccttcgcctcgtgcttgagttgaggcctggcctgggcgctggggccgccgcgtgcgaatctggtggcaccttcgcgcctgtctcgctgctttcgataagtctctagccatttaaaatttttgatgacctgctgcgacgctttttttctggcaagatagtcttgtaaatgcgggccaagatctgcacactggtatttcggtttttggggccgcgggcggcgacggggcccgtgcgtcccagcgcacatgttcggcgaggcggggcctgcgagcgcggccaccgagaatcggacgggggtagtctcaagctggccggcctgctctggtgcctggcctcgcgccgccgtgtatcgccccgccctgggcggcaaggctggcccggtcggcaccagttgcgtgagcggaaagatggccgcttcccggccctgctgcagggagctcaaaatggaggacgcggcgctcgggagagcgggcgggtgagtcacccacacaaaggaaaagggcctttccgtcctcagccgtcgcttcatgtgactccacggagtaccgggcgccgtccaggcacctcgattagttctcgagcttttggagtacgtcgtctttaggttggggggaggggttttatgcgatggagtttccccacactgagtgggtggagactgaagttaggccagcttggcacttgatgtaattctccttggaatttgccctttttgagtttggatcttggttcattctcaagcctcagacagtggttcaaagtttttttcttccatttcaggtgtcgtgagggattcgaaccggtgccgccaccatggagttttcaagtccttccagagaggaatgtcccaagcctttgagtagggtaagcatcatggctggcagcctcacaggattgcttctacttcaggcagtgtcgtgggcatcaggtgcccgcccctgcatccctaaaagcttcggctacagctcggtggtgtgtgtctgcaatgccacatactgtgactcctttgaccccccgacctttcctgcccttggtaccttcagccgctatgagagtacacgcagtgggcgacggatggagctgagtatggggcccatccaggctaatcacacgggcacaggcctgctactgaccctgcagccagaacagaagttccagaaagtgaagggatttggaggggccatgacagatgctgctgctctcaacatccttgccctgtcaccccctgcccaaaatttgctacttaaatcgtacttctctgaagaaggaatcggatataacatcatccgggtacccatggccagctgtgacttctccatccgcacctacacctatgcagacacccctgatgatttccagttgcacaacttcagcctcccagaggaagataccaagctcaagatacccctgattcaccgagccctgcagttggcccagcgtcccgtttcactccttgccagcccctggacatcacccacttggctcaagaccaatggagcggtgaatgggaaggggtcactcaagggacagcccggagacatctaccaccagacctgggccagatactttgtgaagttcctggatgcctatgctgagcacaagttacagttctgggcagtgacagctgaaaatgagccttctgctgggctgttgagtggataccccttccagtgcctgggcttcacccctgaacatcagcgagacttcattgcccgtgacctaggtcctaccctcgccaacagtactcaccacaatgtccgcctactcatgctggatgaccaacgcttgctgctgccccactgggcaaaggtggtactgacagacccagaagcagctaaatatgttcatggcattgctgtacattggtacctggactttctggctccagccaaagccaccctaggggagacacaccgcctgttccccaacaccatgctctttgcctcagaggcctgtgtgggctccaagttctgggagcagagtgtgcggctaggctcctgggatcgagggatgcagtacagccacagcatcatcacgaacctcctgtaccatgtggtcggctggaccgactggaaccttgccctgaaccccgaaggaggacccaattgggtgcgtaactttgtcgacagtcccatcattgtagacatcaccaaggacacgttttacaaacagcccatgttctaccaccttggccacttcagcaagttcattcctgagggctcccagagagtggggctggttgccagtcagaagaacgacctggacgcagtggcactgatgcatcccgatggctctgctgttgtggtcgtgctaaaccgctcctctaaggatgtgcctcttaccatcaaggatcctgctgtgggcttcctggagacaatctcacctggctactccattcacacctacctgtggcgtcgccagtagtaactcgaggacggggtgaactacgcctgaggatccgatctttttccctctgccaaaaattatggggacatcatgaagccccttgagcatctgacttctggctaataaaggaaatttattttcattgcaatagtgtgttggaattttttgtgtctctcactcggcctaggtagataagtagcatggcgggttaatcattaactacaaggaacccctagtgatggagttggccactccctctctgcgcgctcgctcgctcactgaggccgggcgaccaaaggtcgcccgacgcccgggctttgcccgggcggcctcagtgagcgagcgagcgcgcag

SEQ ID NO: 1822 - DNA, 3878 bp, synthetic construct
  source 1..3878: mol_type = other DNA
ctgcgcgctcgctcgctcactgaggccgcccgggcaaagcccgggcgtcgggcgacctttggtcgcccggcctcagtgagcgagcgagcgcgcagagagggagtggccaactccatcactaggggttccttgtagttaatgattaacccgccatgctacttatctaccagggtaatggggatcctctagaactatagctagtcgacattgattattgactagttattaatagtaatcaattacggggtcattagttcatagcccatatatggagttccgcgttacataacttacggtaaatggcccgcctggctgaccgcccaacgacccccgcccattgacgtcaataatgacgtatgttcccatagtaacgccaatagggactttccattgacgtcaatgggtggagtatttacggtaaactgcccacttggcagtacatcaagtgtatcatatgccaagtacgccccctattgacgtcaatgacggtaaatggcccgcctggcattatgcccagtacatgaccttatgggactttcctacttggcagtacatctacgtattagtcatcgctattaccatgtcgaggccacgttctgcttcactctccccatctcccccccctccccacccccaattttgtatttatttattttttaattattttgtgcagcgatgggggcggggggggggggcgcgcgccaggcggggcggggcggggcgaggggcggggcggggcgaggcggagaggtgcggcggcagccaatcagagcggcgcgctccgaaagtttccttttatggcgaggcggcggcggcggcggccctataaaaagcgaagcgcgcggcgggcgggagcaagcttcgtttagtgaaccgtcagatcgcctggagacgccatccacgctgttttgacctccatagaagacaccgggaccgatccagcctccgcggattcgaatcccggccgggaacggtgcattggaacgcggattccccgtgccaagagtgacgtaagtaccgcctatagagtctataggcccacaaaaaatgctttcttcttttaatatacttttttgtttatcttatttctaatactttccctaatctctttctttcagggcaataatgatacaatgtatcatgcctctttgcaccattctaaagaataacagtgataatttctgggttaaggcaatagcaatatttctgcatataaatatttctgcatataaattgtaactgatgtaagaggtttcatattgctaatagcagctacaatccagctaccattctgcttttattttatggttgggataaggctggattattctgagtccaagctaggcccttttgctaatcatgttcatacctcttatcttcctcccacagctcctgggcaacgtgctggtctgtgtgctggcccatcactttggcaaagaattgggattcgaaccggtgccgccaccatggaattctctagcccatctagagaggaatgtcctaagcctctgtcaagagtgtccatcatggccggcagcctgacaggcctgctgctgctgcaggccgtgtcctgggccagtggagcccggccctgcatccctaagtccttcggctattctagcgtggtctgcgtgtgtaatgccacttactgcgacagcttcgaccctcctaccttccccgcccttggaacattcagcagatacgagagcaccagaagcggcagaagaatggaactgagcatgggcccaatccaggccaaccacaccggcaccggcctgctgctgacactgcaacctgagcagaagttccagaaggtgaagggatttggaggcgccatgaccgacgctgctgctctgaacatcctggccctctccccacctgctcagaacctgctgcttaaaagctacttcagcgaggaaggcatcggctataacatcatcagagtgcccatggccagctgcgacttcagcatcagaacatacacctacgccgatacacctgatgacttccaactgcacaacttcagcctgcctgaagaggacacaaagctgaaaatccccctgatccaccgggccctgcagctggcccagagacctgtgagcctgctggcctctccttggacaagccccacctggctgaagaccaatggagctgtgaacggcaagggcagcctgaagggccagcccggcgacatctaccaccaaacctgggctcgctacttcgtgaaattcctggacgcctacgctgagcataagctgcaattttgggccgttacagccgagaacgagccttctgccggcctgctgtctggatatcctttccagtgcctgggcttcacccctgagcaccagagagactttatcgccagagatctggggcctaccctggctaacagcacacaccacaacgtgcggctgctgatgctggacgatcagaggctgctgctcccccactgggccaaggtggtgctgacagatccggaggccgccaaatacgtgcacggcatcgccgtccactggtacctggatttcctggcccctgccaaggccaccctgggcgagacacatagactgtttcctaataccatgctgttcgccagcgaggcctgcgtgggcagcaagttctgggaacagagcgtgcggctgggcagctgggacagaggaatgcagtacagccacagcatcattaccaacctgctgtaccacgtggtgggctggaccgactggaacctggccctgaaccccgaaggcggccccaactgggtgcggaacttcgtggactctcctatcatcgtggatattaccaaggataccttttacaagcagcctatgttctaccacctgggccacttcagcaagttcatccctgagggctctcagcgggtgggcctggtggcctctcagaaaaacgacctggatgccgttgccctgatgcaccccgacggcagcgccgtggtggtcgtcctgaatagaagctccaaggacgtgcctctgaccatcaaggaccccgctgtgggatttctggaaaccatcagccctggctacagcatccacacctacctgtggcggcggcagagaaagaggcgagagggcagaggaagtcttctaacatgcggtgacgtggaggagaatcccggccctatgtacgccctcttcctcctggccagcctcctgggcgcggctctagccgtgaaagagatgcccatgcagactctggtccccgccaaagtggcctccaagaatgtcatccctgccctggaactggtggagcccattaagaagcacgaggtcccagcaaagtctgatgtttactgtgaggtgtgtgaattcctggtgaaggaggtgaccaagctgattgacaacaacaagactgagaaagaaatactcgacgcttttgacaaaatgtgctcgaagctgccgaagtccctgtcggaagagtgccaggaggtggtggacacgtacggcagctccatcctgtccatcctgctggaggaggtcagccctgagctggtgtgcagcatgctgcacctctgctctggctagtaactcgaggacggggtgaactacgcctgaggatccgatctttttccctctgccaaaaattatggggacatcatgaagccccttgagcatctgacttctggctaataaaggaaatttattttcattgcaatagtgtgttggaattttttgtgtctctcactcggcctaggtagataagtagcatggcgggttaatcattaactacaaggaacccctagtgatggagttggccactccctctctgcgcgctcgctcgctcactgaggccgggcgaccaaaggtcgcccgacgcccgggctttgcccgggcggcctcagtgagcgagcgagcgcgcag

SEQ ID NO: 1823 - DNA, 3512 bp, synthetic construct
  source 1..3512: mol_type = other DNA
ctgcgcgctcgctcgctcactgaggccgcccgggcaaagcccgggcgtcgggcgacctttggtcgcccggcctcagtgagcgagcgagcgcgcagagagggagtggccaactccatcactaggggttccttgtagttaatgattaacccgccatgctacttatctaccagggtaatggggatcctctagaactatagctagtcgacattgattattgactagttattaatagtaatcaattacggggtcattagttcatagcccatatatggagttccgcgttacataacttacggtaaatggcccgcctggctgaccgcccaacgacccccgcccattgacgtcaataatgacgtatgttcccatagtaacgccaatagggactttccattgacgtcaatgggtggagtatttacggtaaactgcccacttggcagtacatcaagtgtatcatatgccaagtacgccccctattgacgtcaatgacggtaaatggcccgcctggcattatgcccagtacatgaccttatgggactttcctacttggcagtacatctacgtattagtcatcgctattaccatgtcgaggccacgttctgcttcactctccccatctcccccccctccccacccccaattttgtatttatttattttttaattattttgtgcagcgatgggggcggggggggggggcgcgcgccaggcggggcggggcggggcgaggggcggggcggggcgaggcggagaggtgcggcggcagccaatcagagcggcgcgctccgaaagtttccttttatggcgaggcggcggcggcggcggccctataaaaagcgaagcgcgcggcgggcgggagcaagcttcgtttagtgaaccgtcagatcgcctggagacgccatccacgctgttttgacctccatagaagacaccgggaccgatccagcctccgcggattcgaatcccggccgggaacggtgcattggaacgcggattccccgtgccaagagtgacgtaagtaccgcctatagagtctataggcccacaaaaaatgctttcttcttttaatatacttttttgtttatcttatttctaatactttccctaatctctttctttcagggcaataatgatacaatgtatcatgcctctttgcaccattctaaagaataacagtgataatttctgggttaaggcaatagcaatatttctgcatataaatatttctgcatataaattgtaactgatgtaagaggtttcatattgctaatagcagctacaatccagctaccattctgcttttattttatggttgggataaggctggattattctgagtccaagctaggcccttttgctaatcatgttcatacctcttatcttcctcccacagctcctgggcaacgtgctggtctgtgtgctggcccatcactttggcaaagaattgggattcgaaccggtgccgccaccatggaattctctagcccatctagagaggaatgtcctaagcctctgtcaagagtgtccatcatggccggcagcctgacaggcctgctgctgctgcaggccgtgtcctgggccagtggagcccggccctgcatccctaagtccttcggctattctagcgtggtctgcgtgtgtaatgccacttactgcgacagcttcgaccctcctaccttccccgcccttggaacattcagcagatacgagagcaccagaagcggcagaagaatggaactgagcatgggcccaatccaggccaaccacaccggcaccggcctgctgctgacactgcaacctgagcagaagttccagaaggtgaagggatttggaggcgccatgaccgacgctgctgctctgaacatcctggccctctccccacctgctcagaacctgctgcttaaaagctacttcagcgaggaaggcatcggctataacatcatcagagtgcccatggccagctgcgacttcagcatcagaacatacacctacgccgatacacctgatgacttccaactgcacaacttcagcctgcctgaagaggacacaaagctgaaaatccccctgatccaccgggccctgcagctggcccagagacctgtgagcctgctggcctctccttggacaagccccacctggctgaagaccaatggagctgtgaacggcaagggcagcctgaagggccagcccggcgacatctaccaccaaacctgggctcgctacttcgtgaaattcctggacgcctacgctgagcataagctgcaattttgggccgttacagccgagaacgagccttctgccggcctgctgtctggatatcctttccagtgcctgggcttcacccctgagcaccagagagactttatcgccagagatctggggcctaccctggctaacagcacacaccacaacgtgcggctgctgatgctggacgatcagaggctgctgctcccccactgggccaaggtggtgctgacagatccggaggccgccaaatacgtgcacggcatcgccgtccactggtacctggatttcctggcccctgccaaggccaccctgggcgagacacatagactgtttcctaataccatgctgttcgccagcgaggcctgcgtgggcagcaagttctgggaacagagcgtgcggctgggcagctgggacagaggaatgcagtacagccacagcatcattaccaacctgctgtaccacgtggtgggctggaccgactggaacctggccctgaaccccgaaggcggccccaactgggtgcggaacttcgtggactctcctatcatcgtggatattaccaaggataccttttacaagcagcctatgttctaccacctgggccacttcagcaagttcatccctgagggctctcagcgggtgggcctggtggcctctcagaaaaacgacctggatgccgttgccctgatgcaccccgacggcagcgccgtggtggtcgtcctgaatagaagctccaaggacgtgcctctgaccatcaaggaccccgctgtgggatttctggaaaccatcagccctggctacagcatccacacctacctgtggcggcggcagggaggggggggttcgggtggcggcggaagtgggggcggtggttctctacggaagctgcggaagcggctactgctgcggaaacttcggaaacggctactgtagtaactcgaggacggggtgaactacgcctgaggatccgatctttttccctctgccaaaaattatggggacatcatgaagccccttgagcatctgacttctggctaataaaggaaatttattttcattgcaatagtgtgttggaattttttgtgtctctcactcggcctaggtagataagtagcatggcgggttaatcattaactacaaggaacccctagtgatggagttggccactccctctctgcgcgctcgctcgctcactgaggccgggcgaccaaaggtcgcccgacgcccgggctttgcccgggcggcctcagtgagcgagcgagcgcgcag

SEQ ID NO: 1824 - DNA, 3476 bp, synthetic construct
  source 1..3476: mol_type = other DNA
ctgcgcgctcgctcgctcactgaggccgcccgggcaaagcccgggcgtcgggcgacctttggtcgcccggcctcagtgagcgagcgagcgcgcagagagggagtggccaactccatcactaggggttccttgtagttaatgattaacccgccatgctacttatctaccagggtaatggggatcctctagaactatagctagtcgacattgattattgactagttattaatagtaatcaattacggggtcattagttcatagcccatatatggagttccgcgttacataacttacggtaaatggcccgcctggctgaccgcccaacgacccccgcccattgacgtcaataatgacgtatgttcccatagtaacgccaatagggactttccattgacgtcaatgggtggagtatttacggtaaactgcccacttggcagtacatcaagtgtatcatatgccaagtacgccccctattgacgtcaatgacggtaaatggcccgcctggcattatgcccagtacatgaccttatgggactttcctacttggcagtacatctacgtattagtcatcgctattaccatgtcgaggccacgttctgcttcactctccccatctcccccccctccccacccccaattttgtatttatttattttttaattattttgtgcagcgatgggggcggggggggggggcgcgcgccaggcggggcggggcggggcgaggggcggggcggggcgaggcggagaggtgcggcggcagccaatcagagcggcgcgctccgaaagtttccttttatggcgaggcggcggcggcggcggccctataaaaagcgaagcgcgcggcgggcgggagcaagcttcgtttagtgaaccgtcagatcgcctggagacgccatccacgctgttttgacctccatagaagacaccgggaccgatccagcctccgcggattcgaatcccggccgggaacggtgcattggaacgcggattccccgtgccaagagtgacgtaagtaccgcctatagagtctataggcccacaaaaaatgctttcttcttttaatatacttttttgtttatcttatttctaatactttccctaatctctttctttcagggcaataatgatacaatgtatcatgcctctttgcaccattctaaagaataacagtgataatttctgggttaaggcaatagcaatatttctgcatataaatatttctgcatataaattgtaactgatgtaagaggtttcatattgctaatagcagctacaatccagctaccattctgcttttattttatggttgggataaggctggattattctgagtccaagctaggcccttttgctaatcatgttcatacctcttatcttcctcccacagctcctgggcaacgtgctggtctgtgtgctggcccatcactttggcaaagaattgggattcgaaccggtgccgccaccatggaattctctagcccatctagagaggaatgtcctaagcctctgtcaagagtgtccatcatggccggcagcctgacaggcctgctgctgctgcaggccgtgtcctgggccagtggaatgaaggagaccgctgctgcaaagttcgagagacagcatatggatagctccacaagcgccgcagcccggccctgcatccctaagtccttcggctattctagcgtggtctgcgtgtgtaatgccacttactgcgacagcttcgaccctcctaccttccccgcccttggaacattcagcagatacgagagcaccagaagcggcagaagaatggaactgagcatgggcccaatccaggccaaccacaccggcaccggcctgctgctgacactgcaacctgagcagaagttccagaaggtgaagggatttggaggcgccatgaccgacgctgctgctctgaacatcctggccctctccccacctgctcagaacctgctgcttaaaagctacttcagcgaggaaggcatcggctataacatcatcagagtgcccatggccagctgcgacttcagcatcagaacatacacctacgccgatacacctgatgacttccaactgcacaacttcagcctgcctgaagaggacacaaagctgaaaatccccctgatccaccgggccctgcagctggcccagagacctgtgagcctgctggcctctccttggacaagccccacctggctgaagaccaatggagctgtgaacggcaagggcagcctgaagggccagcccggcgacatctaccaccaaacctgggctcgctacttcgtgaaattcctggacgcctacgctgagcataagctgcaattttgggccgttacagccgagaacgagccttctgccggcctgctgtctggatatcctttccagtgcctgggcttcacccctgagcaccagagagactttatcgccagagatctggggcctaccctggctaacagcacacaccacaacgtgcggctgctgatgctggacgatcagaggctgctgctcccccactgggccaaggtggtgctgacagatccggaggccgccaaatacgtgcacggcatcgccgtccactggtacctggatttcctggcccctgccaaggccaccctgggcgagacacatagactgtttcctaataccatgctgttcgccagcgaggcctgcgtgggcagcaagttctgggaacagagcgtgcggctgggcagctgggacagaggaatgcagtacagccacagcatcattaccaacctgctgtaccacgtggtgggctggaccgactggaacctggccctgaaccccgaaggcggccccaactgggtgcggaacttcgtggactctcctatcatcgtggatattaccaaggataccttttacaagcagcctatgttctaccacctgggccacttcagcaagttcatccctgagggctctcagcgggtgggcctggtggcctctcagaaaaacgacctggatgccgttgccctgatgcaccccgacggcagcgccgtggtggtcgtcctgaatagaagctccaaggacgtgcctctgaccatcaaggaccccgctgtgggatttctggaaaccatcagccctggctacagcatccacacctacctgtggcggcggcagtagtaactcgaggacggggtgaactacgcctgaggatccgatctttttccctctgccaaaaattatggggacatcatgaagccccttgagcatctgacttctggctaataaaggaaatttattttcattgcaatagtgtgttggaattttttgtgtctctcactcggcctaggtagataagtagcatggcgggttaatcattaactacaaggaacccctagtgatggagttggccactccctctctgcgcgctcgctcgctcactgaggccgggcgaccaaaggtcgcccgacgcccgggctttgcccgggcggcctcagtgagcgagcgagcgcgcag

SEQ ID NO: 1825 - DNA, 3428 bp, synthetic construct
  source 1..3428: mol_type = other DNA
ctgcgcgctcgctcgctcactgaggccgcccgggcaaagcccgggcgtcgggcgacctttggtcgcccggcctcagtgagcgagcgagcgcgcagagagggagtggccaactccatcactaggggttccttgtagttaatgattaacccgccatgctacttatctaccagggtaatggggatcctctagaactatagctagtcgacattgattattgactagttattaatagtaatcaattacggggtcattagttcatagcccatatatggagttccgcgttacataacttacggtaaatggcccgcctggctgaccgcccaacgacccccgcccattgacgtcaataatgacgtatgttcccatagtaacgccaatagggactttccattgacgtcaatgggtggagtatttacggtaaactgcccacttggcagtacatcaagtgtatcatatgccaagtacgccccctattgacgtcaatgacggtaaatggcccgcctggcattatgcccagtacatgaccttatgggactttcctacttggcagtacatctacgtattagtcatcgctattaccatgtcgaggccacgttctgcttcactctccccatctcccccccctccccacccccaattttgtatttatttattttttaattattttgtgcagcgatgggggcggggggggggggcgcgcgccaggcggggcggggcggggcgaggggcggggcggggcgaggcggagaggtgcggcggcagccaatcagagcggcgcgctccgaaagtttccttttatggcgaggcggcggcggcggcggccctataaaaagcgaagcgcgcggcgggcgggagcaagcttcgtttagtgaaccgtcagatcgcctggagacgccatccacgctgttttgacctccatagaagacaccgggaccgatccagcctccgcggattcgaatcccggccgggaacggtgcattggaacgcggattccccgtgccaagagtgacgtaagtaccgcctatagagtctataggcccacaaaaaatgctttcttcttttaatatacttttttgtttatcttatttctaatactttccctaatctctttctttcagggcaataatgatacaatgtatcatgcctctttgcaccattctaaagaataacagtgataatttctgggttaaggcaatagcaatatttctgcatataaatatttctgcatataaattgtaactgatgtaagaggtttcatattgctaatagcagctacaatccagctaccattctgcttttattttatggttgggataaggctggattattctgagtccaagctaggcccttttgctaatcatgttcatacctcttatcttcctcccacagctcctgggcaacgtgctggtctgtgtgctggcccatcactttggcaaagaattgggattcgaaccggtgccgccaccatggaattctctagcccatctagagaggaatgtcctaagcctctgtcaagagtgtccatcatggccggcagcctgacaggcctgctgctgctgcaggccgtgtcctgggccagtggagcccggccctgcatccctaagtccttcggctattctagcgtggtctgcgtgtgtaatgccacttactgcgacagcttcgaccctcctaccttccccgcccttggaacattcagcagatacgagagcaccagaagcggcagaagaatggaactgagcatgggcccaatccaggccaaccacaccggcaccggcctgctgctgacactgcaacctgagcagaagttccagaaggtgaagggatttggaggcgccatgaccgacgctgctgctctgaacatcctggccctctccccacctgctcagaacctgctgcttaaaagctacttcagcgaggaaggcatcggctataacatcatcagagtgcccatggccagctgcgacttcagcatcagaacatacacctacgccgatacacctgatgacttccaactgcacaacttcagcctgcctgaagaggacacaaagctgaaaatccccctgatccaccgggccctgcagctggcccagagacctgtgagcctgctggcctctccttggacaagccccacctggctgaagaccaatggagctgtgaacggcaagggcagcctgaagggccagcccggcgacatctaccaccaaacctgggctcgctacttcgtgaaattcctggacgcctacgctgagcataagctgcaattttgggccgttacagccgagaacgagccttctgccggcctgctgtctggatatcctttccagtgcctgggcttcacccctgagcaccagagagactttatcgccagagatctggggcctaccctggctaacagcacacaccacaacgtgcggctgctgatgctggacgatcagaggctgctgctcccccactgggccaaggtggtgctgacagatccggaggccgccaaatacgtgcacggcatcgccgtccactggtacctggatttcctggcccctgccaaggccaccctgggcgagacacatagactgtttcctaataccatgctgttcgccagcgaggcctgcgtgggcagcaagttctgggaacagagcgtgcggctgggcagctgggacagaggaatgcagtacagccacagcatcattaccaacctgctgtaccacgtggtgggctggaccgactggaacctggccctgaaccccgaaggcggccccaactgggtgcggaacttcgtggactctcctatcatcgtggatattaccaaggataccttttacaagcagcctatgttctaccacctgggccacttcagcaagttcatccctgagggctctcagcgggtgggcctggtggcctctcagaaaaacgacctggatgccgttgccctgatgcaccccgacggcagcgccgtggtggtcgtcctgaatagaagctccaaggacgtgcctctgaccatcaaggaccccgctgtgggatttctggaaaccatcagccctggctacagcatccacacctacctgtggcggcggcagcagagattcttcgagtagtaactcgaggacggggtgaactacgcctgaggatccgatctttttccctctgccaaaaattatggggacatcatgaagccccttgagcatctgacttctggctaataaaggaaatttattttcattgcaatagtgtgttggaattttttgtgtctctcactcggcctaggtagataagtagcatggcgggttaatcattaactacaaggaacccctagtgatggagttggccactccctctctgcgcgctcgctcgctcactgaggccgggcgaccaaaggtcgcccgacgcccgggctttgcccgggcggcctcagtgagcgagcgagcgcgcag

SEQ ID NO: 1826 - DNA, 3500 bp, synthetic construct
  source 1..3500: mol_type = other DNA
ctgcgcgctcgctcgctcactgaggccgcccgggcaaagcccgggcgtcgggcgacctttggtcgcccggcctcagtgagcgagcgagcgcgcagagagggagtggccaactccatcactaggggttccttgtagttaatgattaacccgccatgctacttatctaccagggtaatggggatcctctagaactatagctagtcgacattgattattgactagttattaatagtaatcaattacggggtcattagttcatagcccatatatggagttccgcgttacataacttacggtaaatggcccgcctggctgaccgcccaacgacccccgcccattgacgtcaataatgacgtatgttcccatagtaacgccaatagggactttccattgacgtcaatgggtggagtatttacggtaaactgcccacttggcagtacatcaagtgtatcatatgccaagtacgccccctattgacgtcaatgacggtaaatggcccgcctggcattatgcccagtacatgaccttatgggactttcctacttggcagtacatctacgtattagtcatcgctattaccatgtcgaggccacgttctgcttcactctccccatctcccccccctccccacccccaattttgtatttatttattttttaattattttgtgcagcgatgggggcggggggggggggcgcgcgccaggcggggcggggcggggcgaggggcggggcggggcgaggcggagaggtgcggcggcagccaatcagagcggcgcgctccgaaagtttccttttatggcgaggcggcggcggcggcggccctataaaaagcgaagcgcgcggcgggcgggagcaagcttcgtttagtgaaccgtcagatcgcctggagacgccatccacgctgttttgacctccatagaagacaccgggaccgatccagcctccgcggattcgaatcccggccgggaacggtgcattggaacgcggattccccgtgccaagagtgacgtaagtaccgcctatagagtctataggcccacaaaaaatgctttcttcttttaatatacttttttgtttatcttatttctaatactttccctaatctctttctttcagggcaataatgatacaatgtatcatgcctctttgcaccattctaaagaataacagtgataatttctgggttaaggcaatagcaatatttctgcatataaatatttctgcatataaattgtaactgatgtaagaggtttcatattgctaatagcagctacaatccagctaccattctgcttttattttatggttgggataaggctggattattctgagtccaagctaggcccttttgctaatcatgttcatacctcttatcttcctcccacagctcctgggcaacgtgctggtctgtgtgctggcccatcactttggcaaagaattgggattcgaaccggtgccgccaccatggagttttcaagtccttccagagaggaatgtcccaagcctttgagtagggtaagcatcatggctggcagcctcacaggattgcttctacttcaggcagtgtcgtgggcatcaggtgcccgcccctgcatccctaaaagcttcggctacagctcggtggtgtgtgtctgcaatgccacatactgtgactcctttgaccccccgacctttcctgcccttggtaccttcagccgctatgagagtacacgcagtgggcgacggatggagctgagtatggggcccatccaggctaatcacacgggcacaggcctgctactgaccctgcagccagaacagaagttccagaaagtgaagggatttggaggggccatgacagatgctgctgctctcaacatccttgccctgtcaccccctgcccaaaatttgctacttaaatcgtacttctctgaagaaggaatcggatataacatcatccgggtacccatggccagctgtgacttctccatccgcacctacacctatgcagacacccctgatgatttccagttgcacaacttcagcctcccagaggaagataccaagctcaagatacccctgattcaccgagccctgcagttggcccagcgtcccgtttcactccttgccagcccctggacatcacccacttggctcaagaccaatggagcggtgaatgggaaggggtcactcaagggacagcccggagacatctaccaccagacctgggccagatactttgtgaagttcctggatgcctatgctgagcacaagttacagttctgggcagtgacagctgaaaatgagccttctgctgggctgttgagtggataccccttccagtgcctgggcttcacccctgaacatcagcgagacttcattgcccgtgacctaggtcctaccctcgccaacagtactcaccacaatgtccgcctactcatgctggatgaccaacgcttgctgctgccccactgggcaaaggtggtactgacagacccagaagcagctaaatatgttcatggcattgctgtacattggtacctggactttctggctccagccaaagccaccctaggggagacacaccgcctgttccccaacaccatgctctttgcctcagaggcctgtgtgggctccaagttctgggagcagagtgtgcggctaggctcctgggatcgagggatgcagtacagccacagcatcatcacgaacctcctgtaccatgtggtcggctggaccgactggaaccttgccctgaaccccgaaggaggacccaattgggtgcgtaactttgtcgacagtcccatcattgtagacatcaccaaggacacgttttacaaacagcccatgttctaccaccttggccacttcagcaagttcattcctgagggctcccagagagtggggctggttgccagtcagaagaacgacctggacgcagtggcactgatgcatcccgatggctctgctgttgtggtcgtgctaaaccgctcctctaaggatgtgcctcttaccatcaaggatcctgctgtgggcttcctggagacaatctcacctggctactccattcacacctacctgtggcgtcgccagggaggggggggttcgggtggcggcggaagtgggggcggtggttcttatggcaggaaaaagcggaggcaaaggcgccgccccccccagtagtaactcgaggacggggtgaactacgcctgaggatccgatctttttccctctgccaaaaattatggggacatcatgaagccccttgagcatctgacttctggctaataaaggaaatttattttcattgcaatagtgtgttggaattttttgtgtctctcactcggcctaggtagataagtagcatggcgggttaatcattaactacaaggaacccctagtgatggagttggccactccctctctgcgcgctcgctcgctcactgaggccgggcgaccaaaggtcgcccgacgcccgggctttgcccgggcggcctcagtgagcgagcgagcgcgcag

SEQ ID NO: 1827 - DNA, 3500 bp, synthetic construct
  source 1..3500: mol_type = other DNA
ctgcgcgctcgctcgctcactgaggccgcccgggcaaagcccgggcgtcgggcgacctttggtcgcccggcctcagtgagcgagcgagcgcgcagagagggagtggccaactccatcactaggggttccttgtagttaatgattaacccgccatgctacttatctaccagggtaatggggatcctctagaactatagctagtcgacattgattattgactagttattaatagtaatcaattacggggtcattagttcatagcccatatatggagttccgcgttacataacttacggtaaatggcccgcctggctgaccgcccaacgacccccgcccattgacgtcaataatgacgtatgttcccatagtaacgccaatagggactttccattgacgtcaatgggtggagtatttacggtaaactgcccacttggcagtacatcaagtgtatcatatgccaagtacgccccctattgacgtcaatgacggtaaatggcccgcctggcattatgcccagtacatgaccttatgggactttcctacttggcagtacatctacgtattagtcatcgctattaccatgtcgaggccacgttctgcttcactctccccatctcccccccctccccacccccaattttgtatttatttattttttaattattttgtgcagcgatgggggcggggggggggggcgcgcgccaggcggggcggggcggggcgaggggcggggcggggcgaggcggagaggtgcggcggcagccaatcagagcggcgcgctccgaaagtttccttttatggcgaggcggcggcggcggcggccctataaaaagcgaagcgcgcggcgggcgggagcaagcttcgtttagtgaaccgtcagatcgcctggagacgccatccacgctgttttgacctccatagaagacaccgggaccgatccagcctccgcggattcgaatcccggccgggaacggtgcattggaacgcggattccccgtgccaagagtgacgtaagtaccgcctatagagtctataggcccacaaaaaatgctttcttcttttaatatacttttttgtttatcttatttctaatactttccctaatctctttctttcagggcaataatgatacaatgtatcatgcctctttgcaccattctaaagaataacagtgataatttctgggttaaggcaatagcaatatttctgcatataaatatttctgcatataaattgtaactgatgtaagaggtttcatattgctaatagcagctacaatccagctaccattctgcttttattttatggttgggataaggctggattattctgagtccaagctaggcccttttgctaatcatgttcatacctcttatcttcctcccacagctcctgggcaacgtgctggtctgtgtgctggcccatcactttggcaaagaattgggattcgaaccggtgccgccaccatggaattctctagcccatctagagaggaatgtcctaagcctctgtcaagagtgtccatcatggccggcagcctgacaggcctgctgctgctgcaggccgtgtcctgggccagtggagcccggccctgcatccctaagtccttcggctattctagcgtggtctgcgtgtgtaatgccacttactgcgacagcttcgaccctcctaccttccccgcccttggaacattcagcagatacgagagcaccagaagcggcagaagaatggaactgagcatgggcccaatccaggccaaccacaccggcaccggcctgctgctgacactgcaacctgagcagaagttccagaaggtgaagggatttggaggcgccatgaccgacgctgctgctctgaacatcctggccctctccccacctgctcagaacctgctgcttaaaagctacttcagcgaggaaggcatcggctataacatcatcagagtgcccatggccagctgcgacttcagcatcagaacatacacctacgccgatacacctgatgacttccaactgcacaacttcagcctgcctgaagaggacacaaagctgaaaatccccctgatccaccgggccctgcagctggcccagagacctgtgagcctgctggcctctccttggacaagccccacctggctgaagaccaatggagctgtgaacggcaagggcagcctgaagggccagcccggcgacatctaccaccaaacctgggctcgctacttcgtgaaattcctggacgcctacgctgagcataagctgcaattttgggccgttacagccgagaacgagccttctgccggcctgctgtctggatatcctttccagtgcctgggcttcacccctgagcaccagagagactttatcgccagagatctggggcctaccctggctaacagcacacaccacaacgtgcggctgctgatgctggacgatcagaggctgctgctcccccactgggccaaggtggtgctgacagatccggaggccgccaaatacgtgcacggcatcgccgtccactggtacctggatttcctggcccctgccaaggccaccctgggcgagacacatagactgtttcctaataccatgctgttcgccagcgaggcctgcgtgggcagcaagttctgggaacagagcgtgcggctgggcagctgggacagaggaatgcagtacagccacagcatcattaccaacctgctgtaccacgtggtgggctggaccgactggaacctggccctgaaccccgaaggcggccccaactgggtgcggaacttcgtggactctcctatcatcgtggatattaccaaggataccttttacaagcagcctatgttctaccacctgggccacttcagcaagttcatccctgagggctctcagcgggtgggcctggtggcctctcagaaaaacgacctggatgccgttgccctgatgcaccccgacggcagcgccgtggtggtcgtcctgaatagaagctccaaggacgtgcctctgaccatcaaggaccccgctgtgggatttctggaaaccatcagccctggctacagcatccacacctacctgtggcggcggcagggaggggggggttcgggtggcggcggaagtgggggcggtggttcttatggcaggaaaaagcggaggcaaaggcgccgccccccccagtagtaactcgaggacggggtgaactacgcctgaggatccgatctttttccctctgccaaaaattatggggacatcatgaagccccttgagcatctgacttctggctaataaaggaaatttattttcattgcaatagtgtgttggaattttttgtgtctctcactcggcctaggtagataagtagcatggcgggttaatcattaactacaaggaacccctagtgatggagttggccactccctctctgcgcgctcgctcgctcactgaggccgggcgaccaaaggtcgcccgacgcccgggctttgcccgggcggcctcagtgagcgagcgagcgcgcag

SEQ ID NO: 1828 - DNA, 3571 bp, synthetic construct
  source 1..3571: mol_type = other DNA
ctgcgcgctcgctcgctcactgaggccgcccgggcaaagcccgggcgtcgggcgacctttggtcgcccggcctcagtgagcgagcgagcgcgcagagagggagtggccaactccatcactaggggttccttgtagttaatgattaacccgccatgctacttatctaccagggtaatggggatcctctagaactatagctagtcgacattgattattgactagttattaatagtaatcaattacggggtcattagttcatagcccatatatggagttccgcgttacataacttacggtaaatggcccgcctggctgaccgcccaacgacccccgcccattgacgtcaataatgacgtatgttcccatagtaacgccaatagggactttccattgacgtcaatgggtggagtatttacggtaaactgcccacttggcagtacatcaagtgtatcatatgccaagtacgccccctattgacgtcaatgacggtaaatggcccgcctggcattatgcccagtacatgaccttatgggactttcctacttggcagtacatctacgtattagtcatcgctattaccatgtcgaggccacgttctgcttcactctccccatctcccccccctccccacccccaattttgtatttatttattttttaattattttgtgcagcgatgggggcggggggggggggcgcgcgccaggcggggcggggcggggcgaggggcggggcggggcgaggcggagaggtgcggcggcagccaatcagagcggcgcgctccgaaagtttccttttatggcgaggcggcggcggcggcggccctataaaaagcgaagcgcgcggcgggcgggagcaagcttcgtttagtgaaccgtcagatcgcctggagacgccatccacgctgttttgacctccatagaagacaccgggaccgatccagcctccgcggattcgaatcccggccgggaacggtgcattggaacgcggattccccgtgccaagagtgacgtaagtaccgcctatagagtctataggcccacaaaaaatgctttcttcttttaatatacttttttgtttatcttatttctaatactttccctaatctctttctttcagggcaataatgatacaatgtatcatgcctctttgcaccattctaaagaataacagtgataatttctgggttaaggcaatagcaatatttctgcatataaatatttctgcatataaattgtaactgatgtaagaggtttcatattgctaatagcagctacaatccagctaccattctgcttttattttatggttgggataaggctggattattctgagtccaagctaggcccttttgctaatcatgttcatacctcttatcttcctcccacagctcctgggcaacgtgctggtctgtgtgctggcccatcactttggcaaagaattgggattcgaaccggtgccgccaccatggaattctctagcccatctagagaggaatgtcctaagcctctgtcaagagtgtccatcatggccggcagcctgacaggcctgctgctgctgcaggccgtgtcctgggccagtggagcccggccctgcatccctaagtccttcggctattctagcgtggtctgcgtgtgtaatgccacttactgcgacagcttcgaccctcctaccttccccgcccttggaacattcagcagatacgagagcaccagaagcggcagaagaatggaactgagcatgggcccaatccaggccaaccacaccggcaccggcctgctgctgacactgcaacctgagcagaagttccagaaggtgaagggatttggaggcgccatgaccgacgctgctgctctgaacatcctggccctctccccacctgctcagaacctgctgcttaaaagctacttcagcgaggaaggcatcggctataacatcatcagagtgcccatggccagctgcgacttcagcatcagaacatacacctacgccgatacacctgatgacttccaactgcacaacttcagcctgcctgaagaggacacaaagctgaaaatccccctgatccaccgggccctgcagctggcccagagacctgtgagcctgctggcctctccttggacaagccccacctggctgaagaccaatggagctgtgaacggcaagggcagcctgaagggccagcccggcgacatctaccaccaaacctgggctcgctacttcgtgaaattcctggacgcctacgctgagcataagctgcaattttgggccgttacagccgagaacgagccttctgccggcctgctgtctggatatcctttccagtgcctgggcttcacccctgagcaccagagagactttatcgccagagatctggggcctaccctggctaacagcacacaccacaacgtgcggctgctgatgctggacgatcagaggctgctgctcccccactgggccaaggtggtgctgacagatccggaggccgccaaatacgtgcacggcatcgccgtccactggtacctggatttcctggcccctgccaaggccaccctgggcgagacacatagactgtttcctaataccatgctgttcgccagcgaggcctgcgtgggcagcaagttctgggaacagagcgtgcggctgggcagctgggacagaggaatgcagtacagccacagcatcattaccaacctgctgtaccacgtggtgggctggaccgactggaacctggccctgaaccccgaaggcggccccaactgggtgcggaacttcgtggactctcctatcatcgtggatattaccaaggataccttttacaagcagcctatgttctaccacctgggccacttcagcaagttcatccctgagggctctcagcgggtgggcctggtggcctctcagaaaaacgacctggatgccgttgccctgatgcaccccgacggcagcgccgtggtggtcgtcctgaatagaagctccaaggacgtgcctctgaccatcaaggaccccgctgtgggatttctggaaaccatcagccctggctacagcatccacacctacctgtggcggcggcagtagtaacctcgaggtaccaggagctcttctcctagtgaattctaccagtgccatagatagttaagtgaattctaccagtgccatagatagttaagtgaattctaccagtgccatagatagttaagtgaattctaccagtgccatactgcagtcaggtctataccatcgaggacggggtgaactacgcctgaggatccgatctttttccctctgccaaaaattatggggacatcatgaagccccttgagcatctgacttctggctaataaaggaaatttattttcattgcaatagtgtgttggaattttttgtgtctctcactcggcctaggtagataagtagcatggcgggttaatcattaactacaaggaacccctagtgatggagttggccactccctctctgcgcgctcgctcgctcactgaggccgggcgaccaaaggtcgcccgacgcccgggctttgcccgggcggcctcagtgagcgagcgagcgcgcag

SEQ ID NO: 1829 - DNA, 130 bp, synthetic construct
  source 1..130: mol_type = other DNA
ctgcgcgctcgctcgctcactgaggccgcccgggcaaagcccgggcgtcgggcgacctttggtcgcccggcctcagtgagcgagcgagcgcgcagagagggagtggccaactccatcactaggggttcct

SEQ ID NO: 1830 - DNA, 130 bp, synthetic construct
  source 1..130: mol_type = other DNA
aggaacccctagtgatggagttggccactccctctctgcgcgctcgctcgctcactgaggccgggcgaccaaaggtcgcccgacgcccgggctttgcccgggcggcctcagtgagcgagcgagcgcgcag

SEQ ID NO: 1831 - DNA, 380 bp, synthetic construct
  source 1..380: mol_type = other DNA
gacattgattattgactagttattaatagtaatcaattacggggtcattagttcatagcccatatatggagttccgcgttacataacttacggtaaatggcccgcctggctgaccgcccaacgacccccgcccattgacgtcaataatgacgtatgttcccatagtaacgccaatagggactttccattgacgtcaatgggtggagtatttacggtaaactgcccacttggcagtacatcaagtgtatcatatgccaagtacgccccctattgacgtcaatgacggtaaatggcccgcctggcattatgcccagtacatgaccttatgggactttcctacttggcagtacatctacgtattagtcatcgctattaccatg

SEQ ID NO: 1832 - DNA, 205 bp, synthetic construct
  source 1..205: mol_type = other DNA
gtgatgcggttttggcagtacatcaatgggcgtggatagcggtttgactcacggggatttccaagtctccaccccattgacgtcaatgggagtttgttttggcaccaaaatcaacgggactttccaaaatgtcgtaacaactccgccccattgacgcaaatgggcggtaggcgtgtacggtgggaggtctatataagcagagctc

SEQ ID NO: 1833 - DNA, 585 bp, synthetic construct
  source 1..585: mol_type = other DNA
gacattgattattgactagttattaatagtaatcaattacggggtcattagttcatagcccatatatggagttccgcgttacataacttacggtaaatggcccgcctggctgaccgcccaacgacccccgcccattgacgtcaataatgacgtatgttcccatagtaacgccaatagggactttccattgacgtcaatgggtggagtatttacggtaaactgcccacttggcagtacatcaagtgtatcatatgccaagtacgccccctattgacgtcaatgacggtaaatggcccgcctggcattatgcccagtacatgaccttatgggactttcctacttggcagtacatctacgtattagtcatcgctattaccatggtgatgcggttttggcagtacatcaatgggcgtggatagcggtttgactcacggggatttccaagtctccaccccattgacgtcaatgggagtttgttttggcaccaaaatcaacgggactttccaaaatgtcgtaacaactccgccccattgacgcaaatgggcggtaggcgtgtacggtgggaggtctatataagcagagctc

SEQ ID NO: 1834 - DNA, 260 bp, synthetic construct
  source 1..260: mol_type = other DNA
ccacgttctgcttcactctccccatctcccccccctccccacccccaattttgtatttatttattttttaattattttgtgcagcgatgggggcggggggggggggcgcgcgccaggcggggcggggcggggcgaggggcggggcggggcgaggcggagaggtgcggcggcagccaatcagagcggcgcgctccgaaagtttccttttatggcgaggcggcggcggcggcggccctataaaaagcgaagcgcgcggcggg

SEQ ID NO: 1835 - DNA, 1715 bp, synthetic construct
  source 1..1715: mol_type = other DNA
ctagttattaatagtaatcaattacggggtcattagttcatagcccatatatggagttccgcgttacataacttacggtaaatggcccgcctggctgaccgcccaacgacccccgcccattgacgtcaataatgacgtatgttcccatagtaacgccaatagggactttccattgacgtcaatgggtggagtatttacggtaaactgcccacttggcagtacatcaagtgtatcatatgccaagtacgccccctattgacgtcaatgacggtaaatggcccgcctggcattatgcccagtacatgaccttatgggactttcctacttggcagtacatctacgtattagtcatcgctattaccatggtcgaggtgagccccacgttctgcttcactctccccatctcccccccctccccacccccaattttgtatttatttattttttaattattttgtgcagcgatgggggcggggggggggggggggcgcgcgccaggcggggcggggcggggcgaggggcggggcggggcgaggcggagaggtgcggcggcagccaatcagagcggcgcgctccgaaagtttccttttatggcgaggcggcggcggcggcggccctataaaaagcgaagcgcgcggcgggcgggagtcgctgcgcgctgccttcgccccgtgccccgctccgccgccgcctcgcgccgcccgccccggctctgactgaccgcgttactcccacaggtgagcgggcgggacggcccttctcctccgggctgtaattagcgcttggtttaatgacggcttgtttcttttctgtggctgcgtgaaagccttgaggggctccgggagggccctttgtgcggggggagcggctcggggggtgcgtgcgtgtgtgtgtgcgtggggagcgccgcgtgcggctccgcgctgcccggcggctgtgagcgctgcgggcgcggcgcggggctttgtgcgctccgcagtgtgcgcgaggggagcgcggccgggggcggtgccccgcggtgcggggggggctgcgaggggaacaaaggctgcgtgcggggtgtgtgcgtgggggggtgagcagggggtgtgggcgcgtcggtcgggctgcaaccccccctgcacccccctccccgagttgctgagcacggcccggcttcgggtgcggggctccgtacggggcgtggcgcggggctcgccgtgccgggcggggggtggcggcaggtgggggtgccgggcggggcggggccgcctcgggccggggagggctcgggggaggggcgcggcggcccccggagcgccggcggctgtcgaggcgcggcgagccgcagccattgccttttatggtaatcgtgcgagagggcgcagggacttcctttgtcccaaatctgtgcggagccgaaatctgggaggcgccgccgcaccccctctagcgggcgcggggcgaagcggtgcggcgccggcaggaaggaaatgggcggggagggccttcgtgcgtcgccgcgccgccgtccccttctccctctccagcctcggggctgtccgcggggggacggctgccttcgggggggacggggcagggcggggttcggcttctggcgtgtgaccggcggctctagagcctctgctaaccatgttcatgccttcttctttttcctacagctcctgggcaacgtgctggttattgtgctgtctcatcattttggcaaagaattc

SEQ ID NO: 1836 - DNA, 283 bp, synthetic construct
  source 1..283: mol_type = other DNA
catggtcgaggtgagccccacgttctgcttcactctccccatctcccccccctccccacccccaattttgtatttatttattttttaattattttgtgcagcgatgggggcggggggggggggggggcgcgcgccaggcggggcggggcggggcgaggggcggggcggggcgaggcggagaggtgcggcggcagccaatcagagcggcgcgctccgaaagtttccttttatggcgaggcggcggcggcggcggccctataaaaagcgaagcgcgcggcgggcg

SEQ ID NO: 1837 - DNA, 1016 bp, synthetic construct
  source 1..1016: mol_type = other DNA
ggagtcgctgcgcgctgccttcgccccgtgccccgctccgccgccgcctcgcgccgcccgccccggctctgactgaccgcgttactcccacaggtgagcgggcgggacggcccttctcctccgggctgtaattagcgcttggtttaatgacggcttgtttcttttctgtggctgcgtgaaagccttgaggggctccgggagggccctttgtgcggggggagcggctcggggggtgcgtgcgtgtgtgtgtgcgtggggagcgccgcgtgcggctccgcgctgcccggcggctgtgagcgctgcgggcgcggcgcggggctttgtgcgctccgcagtgtgcgcgaggggagcgcggccgggggcggtgccccgcggtgcggggggggctgcgaggggaacaaaggctgcgtgcggggtgtgtgcgtgggggggtgagcagggggtgtgggcgcgtcggtcgggctgcaaccccccctgcacccccctccccgagttgctgagcacggcccggcttcgggtgcggggctccgtacggggcgtggcgcggggctcgccgtgccgggcggggggtggcggcaggtgggggtgccgggcggggcggggccgcctcgggccggggagggctcgggggaggggcgcggcggcccccggagcgccggcggctgtcgaggcgcggcgagccgcagccattgccttttatggtaatcgtgcgagagggcgcagggacttcctttgtcccaaatctgtgcggagccgaaatctgggaggcgccgccgcaccccctctagcgggcgcggggcgaagcggtgcggcgccggcaggaaggaaatgggcggggagggccttcgtgcgtcgccgcgccgccgtccccttctccctctccagcctcggggctgtccgcggggggacggctgccttcgggggggacggggcagggcggggttcggcttctggcgtgtgaccggcggctctagagcctctgctaaccatgttcatgccttcttctttttcctaca

SEQ ID NO: 1838 - DNA, 10 bp, synthetic construct
  source 1..10: mol_type = other DNA
gcatgcgtga

SEQ ID NO: 1839 - DNA, 1189 bp, synthetic construct
  source 1..1189: mol_type = other DNA
gcatgcgtgaggctccggtgcccgtcagtgggcagagcgcacatcgcccacagtccccgagaagttggggggaggggtcggcaattgaaccggtgcctagagaaggtggcgcggggtaaactgggaaagtgatgtcgtgtactggctccgcctttttcccgagggtgggggagaaccgtatataagtgcagtagtcgccgtgaacgttctttttcgcaacgggtttgccgccagaacacaggtaagtgccgtgtgtggttcccgcgggcctggcctctttacgggttatggcccttgcgtgccttgaattacttccacctggctgcagtacgtgattcttgatcccgagcttcgggttggaagtgggtgggagagttcgaggccttgcgcttaaggagccccttcgcctcgtgcttgagttgaggcctggcctgggcgctggggccgccgcgtgcgaatctggtggcaccttcgcgcctgtctcgctgctttcgataagtctctagccatttaaaatttttgatgacctgctgcgacgctttttttctggcaagatagtcttgtaaatgcgggccaagatctgcacactggtatttcggtttttggggccgcgggcggcgacggggcccgtgcgtcccagcgcacatgttcggcgaggcggggcctgcgagcgcggccaccgagaatcggacgggggtagtctcaagctggccggcctgctctggtgcctggcctcgcgccgccgtgtatcgccccgccctgggcggcaaggctggcccggtcggcaccagttgcgtgagcggaaagatggccgcttcccggccctgctgcagggagctcaaaatggaggacgcggcgctcgggagagcgggcgggtgagtcacccacacaaaggaaaagggcctttccgtcctcagccgtcgcttcatgtgactccacggagtaccgggcgccgtccaggcacctcgattagttctcgagcttttggagtacgtcgtctttaggttggggggaggggttttatgcgatggagtttccccacactgagtgggtggagactgaagttaggccagcttggcacttgatgtaattctccttggaatttgccctttttgagtttggatcttggttcattctcaagcctcagacagtggttcaaagtttttttcttccatttcaggtgtcgtga

SEQ ID NO: 1840 - DNA, 1179 bp, synthetic construct
  source 1..1179: mol_type = other DNA
ggctccggtgcccgtcagtgggcagagcgcacatcgcccacagtccccgagaagttggggggaggggtcggcaattgaaccggtgcctagagaaggtggcgcggggtaaactgggaaagtgatgtcgtgtactggctccgcctttttcccgagggtgggggagaaccgtatataagtgcagtagtcgccgtgaacgttctttttcgcaacgggtttgccgccagaacacaggtaagtgccgtgtgtggttcccgcgggcctggcctctttacgggttatggcccttgcgtgccttgaattacttccacctggctgcagtacgtgattcttgatcccgagcttcgggttggaagtgggtgggagagttcgaggccttgcgcttaaggagccccttcgcctcgtgcttgagttgaggcctggcctgggcgctggggccgccgcgtgcgaatctggtggcaccttcgcgcctgtctcgctgctttcgataagtctctagccatttaaaatttttgatgacctgctgcgacgctttttttctggcaagatagtcttgtaaatgcgggccaagatctgcacactggtatttcggtttttggggccgcgggcggcgacggggcccgtgcgtcccagcgcacatgttcggcgaggcggggcctgcgagcgcggccaccgagaatcggacgggggtagtctcaagctggccggcctgctctggtgcctggcctcgcgccgccgtgtatcgccccgccctgggcggcaaggctggcccggtcggcaccagttgcgtgagcggaaagatggccgcttcccggccctgctgcagggagctcaaaatggaggacgcggcgctcgggagagcgggcgggtgagtcacccacacaaaggaaaagggcctttccgtcctcagccgtcgcttcatgtgactccacggagtaccgggcgccgtccaggcacctcgattagttctcgagcttttggagtacgtcgtctttaggttggggggaggggttttatgcgatggagtttccccacactgagtgggtggagactgaagttaggccagcttggcacttgatgtaattctccttggaatttgccctttttgagtttggatcttggttcattctcaagcctcagacagtggttcaaagtttttttcttccatttcaggtgtcgtga

SEQ ID NO: 1841 - DNA, 939 bp, synthetic construct
  source 1..939: mol_type = other DNA
gtaagtgccgtgtgtggttcccgcgggcctggcctctttacgggttatggcccttgcgtgccttgaattacttccacctggctgcagtacgtgattcttgatcccgagcttcgggttggaagtgggtgggagagttcgaggccttgcgcttaaggagccccttcgcctcgtgcttgagttgaggcctggcctgggcgctggggccgccgcgtgcgaatctggtggcaccttcgcgcctgtctcgctgctttcgataagtctctagccatttaaaatttttgatgacctgctgcgacgctttttttctggcaagatagtcttgtaaatgcgggccaagatctgcacactggtatttcggtttttggggccgcgggcggcgacggggcccgtgcgtcccagcgcacatgttcggcgaggcggggcctgcgagcgcggccaccgagaatcggacgggggtagtctcaagctggccggcctgctctggtgcctggcctcgcgccgccgtgtatcgccccgccctgggcggcaaggctggcccggtcggcaccagttgcgtgagcggaaagatggccgcttcccggccctgctgcagggagctcaaaatggaggacgcggcgctcgggagagcgggcgggtgagtcacccacacaaaggaaaagggcctttccgtcctcagccgtcgcttcatgtgactccacggagtaccgggcgccgtccaggcacctcgattagttctcgagcttttggagtacgtcgtctttaggttggggggaggggttttatgcgatggagtttccccacactgagtgggtggagactgaagttaggccagcttggcacttgatgtaattctccttggaatttgccctttttgagtttggatcttggttcattctcaagcctcagacagtggttcaaagtttttttcttccatttcag

SEQ ID NO: 1842 - DNA, 566 bp, synthetic construct
  source 1..566: mol_type = other DNA
tcagatcgcctggagacgccatccacgctgttttgacctccatagaagacaccgggaccgatccagcctccgcggattcgaatcccggccgggaacggtgcattggaacgcggattccccgtgccaagagtgacgtaagtaccgcctatagagtctataggcccacaaaaaatgctttcttcttttaatatacttttttgtttatcttatttctaatactttccctaatctctttctttcagggcaataatgatacaatgtatcatgcctctttgcaccattctaaagaataacagtgataatttctgggttaaggcaatagcaatatttctgcatataaatatttctgcatataaattgtaactgatgtaagaggtttcatattgctaatagcagctacaatccagctaccattctgcttttattttatggttgggataaggctggattattctgagtccaagctaggcccttttgctaatcatgttcatacctcttatcttcctcccacagctcctgggcaacgtgctggtctgtgtgctggcccatcactttggcaaagaatt

SEQ ID NO: 1843 - protein, 5 aa, synthetic construct
GGGGS

SEQ ID NO: 1844 - skipped

SEQ ID NO: 1845 - protein, 15 aa, synthetic construct
GGGGSGGGGSGGGGS

SEQ ID NO: 1846 - DNA, 127 bp, synthetic construct
  source 1..127: mol_type = other DNA
gatctttttccctctgccaaaaattatggggacatcatgaagccccttgagcatctgacttctggctaataaaggaaatttattttcattgcaatagtgtgttggaattttttgtgtctctcactcg

SEQ ID NO: 1847 - DNA, 22 bp, unidentified
  source 1..22: mol_type = unassigned DNA
agtgaattctaccagtgccata

SEQ ID NO: 1848 - skipped

SEQ ID NO: 1849 - DNA, 112 bp, unidentified
  source 1..112: mol_type = unassigned DNA
agtgaattctaccagtgccatagatagttaagtgaattctaccagtgccatagatagttaagtgaattctaccagtgccatagatagttaagtgaattctaccagtgccata

SEQ ID NO: 1850 - DNA, 117 bp, synthetic construct
  source 1..117: mol_type = other DNA
atggaattctctagcccatctagagaggaatgtcctaagcctctgtcaagagtgtccatcatggccggcagcctgacaggcctgctgctgctgcaggccgtgtcctgggccagtgga

SEQ ID NO: 1851 - DNA, 117 bp, synthetic construct
  source 1..117: mol_type = other DNA
atggagttttcaagtccttccagagaggaatgtcccaagcctttgagtagggtaagcatcatggctggcagcctcacaggattgcttctacttcaggcagtgtcgtgggcatcaggt

SEQ ID NO: 1852 - DNA, 117 bp, synthetic construct
  source 1..117: mol_type = other DNA
atggaattcagcagccccagcagagaggaatgccccaagcctctgagccgggtgtcaatcatggccggatctctgacaggactgctgctgcttcaggccgtgtcttgggcttctggc

SEQ ID NO: 1853 - protein, 39 aa, synthetic construct
MEFSSPSREECPKPLSRVSIMAGSLTGLLLLQAVSWASG

SEQ ID NO: 1854 - protein, 4 aa, synthetic construct
RKRR

SEQ ID NO: 1855 - protein, 18 aa, synthetic construct
EGRGSLLTCGDVEENPGP

SEQ ID NO: 1856 - DNA, 48 bp, Homo sapiens
  source 1..48: mol_type = genomic DNA
atgtacgccctcttcctcctggccagcctcctgggcgcggctctagcc

SEQ ID NO: 1857 - protein, 16 aa, Homo sapiens
MYALFLLASLLGAALA

SEQ ID NO: 1858 - DNA, 1575 bp, Homo sapiens
  source 1..1575: mol_type = genomic DNA
atgtacgccctcttcctcctggccagcctcctgggcgcggctctagccggcccggtccttggactgaaagaatgcaccaggggctcggcagtgtggtgccagaatgtgaagacggcgtccgactgcggggcagtgaagcactgcctgcagaccgtttggaacaagccaacagtgaaatcccttccctgcgacatatgcaaagacgttgtcaccgcagctggtgatatgctgaaggacaatgccactgaggaggagatccttgtttacttggagaagacctgtgactggcttccgaaaccgaacatgtctgcttcatgcaaggagatagtggactcctacctccctgtcatcctggacatcattaaaggagaaatgagccgtcctggggaggtgtgctctgctctcaacctctgcgagtctctccagaagcacctagcagagctgaatcaccagaagcagctggagtccaataagatcccagagctggacatgactgaggtggtggcccccttcatggccaacatccctctcctcctctaccctcaggacggcccccgcagcaagccccagccaaaggataatggggacgtttgccaggactgcattcagatggtgactgacatccagactgctgtacggaccaactccacctttgtccaggccttggtggaacatgtcaaggaggagtgtgaccgcctgggccctggcatggccgacatatgcaagaactatatcagccagtattctgaaattgctatccagatgatgatgcacatgcaacccaaggagatctgtgcgctggttgggttctgtgatgaggtgaaagagatgcccatgcagactctggtccccgccaaagtggcctccaagaatgtcatccctgccctggaactggtggagcccattaagaagcacgaggtcccagcaaagtctgatgtttactgtgaggtgtgtgaattcctggtgaaggaggtgaccaagctgattgacaacaacaagactgagaaagaaatactcgacgcttttgacaaaatgtgctcgaagctgccgaagtccctgtcggaagagtgccaggaggtggtggacacgtacggcagctccatcctgtccatcctgctggaggaggtcagccctgagctggtgtgcagcatgctgcacctctgctctggcacgcggctgcctgcactgaccgttcacgtgactcagccaaaggacggtggcttctgcgaagtgtgcaagaagctggtgggttatttggatcgcaacctggagaaaaacagcaccaagcaggagatcctggctgctcttgagaaaggctgcagcttcctgccagacccttaccagaagcagtgtgatcagtttgtggcagagtacgagcccgtgctgatcgagatcctggtggaggtgatggatccttccttcgtgtgcttgaaaattggagcctgcccctcggcccataagcccttgttgggaactgagaagtgtatatggggcccaagctactggtgccagaacacagagacagcagcccagtgcaatgctgtcgagcattgcaaacgccatgtgtggaactag

SEQ ID NO: 1859 - DNA, 1527 bp, Homo sapiens
  source 1..1527: mol_type = genomic DNA
ggcccggtccttggactgaaagaatgcaccaggggctcggcagtgtggtgccagaatgtgaagacggcgtccgactgcggggcagtgaagcactgcctgcagaccgtttggaacaagccaacagtgaaatcccttccctgcgacatatgcaaagacgttgtcaccgcagctggtgatatgctgaaggacaatgccactgaggaggagatccttgtttacttggagaagacctgtgactggcttccgaaaccgaacatgtctgcttcatgcaaggagatagtggactcctacctccctgtcatcctggacatcattaaaggagaaatgagccgtcctggggaggtgtgctctgctctcaacctctgcgagtctctccagaagcacctagcagagctgaatcaccagaagcagctggagtccaataagatcccagagctggacatgactgaggtggtggcccccttcatggccaacatccctctcctcctctaccctcaggacggcccccgcagcaagccccagccaaaggataatggggacgtttgccaggactgcattcagatggtgactgacatccagactgctgtacggaccaactccacctttgtccaggccttggtggaacatgtcaaggaggagtgtgaccgcctgggccctggcatggccgacatatgcaagaactatatcagccagtattctgaaattgctatccagatgatgatgcacatgcaacccaaggagatctgtgcgctggttgggttctgtgatgaggtgaaagagatgcccatgcagactctggtccccgccaaagtggcctccaagaatgtcatccctgccctggaactggtggagcccattaagaagcacgaggtcccagcaaagtctgatgtttactgtgaggtgtgtgaattcctggtgaaggaggtgaccaagctgattgacaacaacaagactgagaaagaaatactcgacgcttttgacaaaatgtgctcgaagctgccgaagtccctgtcggaagagtgccaggaggtggtggacacgtacggcagctccatcctgtccatcctgctggaggaggtcagccctgagctggtgtgcagcatgctgcacctctgctctggcacgcggctgcctgcactgaccgttcacgtgactcagccaaaggacggtggcttctgcgaagtgtgcaagaagctggtgggttatttggatcgcaacctggagaaaaacagcaccaagcaggagatcctggctgctcttgagaaaggctgcagcttcctgccagacccttaccagaagcagtgtgatcagtttgtggcagagtacgagcccgtgctgatcgagatcctggtggaggtgatggatccttccttcgtgtgcttgaaaattggagcctgcccctcggcccataagcccttgttgggaactgagaagtgtatatggggcccaagctactggtgccagaacacagagacagcagcccagtgcaatgctgtcgagcattgcaaacgccatgtgtggaactag

SEQ ID NO: 1860 - DNA, 19 bp, synthetic construct
  source 1..19: mol_type = other DNA
tattagatctgatggccgc

SEQ ID NO: 1861 - DNA, 20 bp, synthetic construct
  source 1..20: mol_type = other DNA
ctccatcactaggggttcct

SEQ ID NO: 1862 - DNA, 145 bp, synthetic construct
  source 1..145: mol_type = other DNA
aggaacccctagtgatggagttggccactccctctctgcgcgctcgctcgctcactgaggccgggcgaccaaaggtcgcccgacgcccgggctttgcccgggcggcctcagtgagcgagcgagcgcgcagagagggagtggccaa

SEQ ID NO: 1863 - DNA, 20 bp, synthetic construct
  source 1..20: mol_type = other DNA
tattagatctgatggccgcg

SEQ ID NO: 1864 - DNA, 20 bp, synthetic construct
  source 1..20: mol_type = other DNA
tccatcactaggggttcctg

SEQ ID NO: 1865 - DNA, 23 bp, synthetic construct
  source 1..23: mol_type = other DNA
acaaacaccattgtcacactcca

SEQ ID NO: 1866 - DNA, 71 bp, unidentified
  source 1..71: mol_type = unassigned DNA
acaaacaccattgtcacactccacacaaacaccattgtcacactccacacaaacaccattgtcacactcca

SEQ ID NO: 1867 - DNA, 24 bp, unidentified
  source 1..24: mol_type = unassigned DNA
agtgtgagttctaccattgccaaa

SEQ ID NO: 1868 - DNA, 23 bp, unidentified
  source 1..23: mol_type = unassigned DNA
agcaaaaatgtgctagtgccaaa

SEQ ID NO: 1869 - DNA, 23 bp, unidentified
  source 1..23: mol_type = unassigned DNA
tccataaagtaggaaacactaca

SEQ ID NO: 1870 - DNA, 3571 bp, synthetic construct
  source 1..3571: mol_type = other DNA
ctgcgcgctcgctcgctcactgaggccgcccgggcaaagcccgggcgtcgggcgacctttggtcgcccggcctcagtgagcgagcgagcgcgcagagagggagtggccaactccatcactaggggttccttgtagttaatgattaacccgccatgctacttatctaccagggtaatggggatcctctagaactatagctagtcgacattgattattgactagttattaatagtaatcaattacggggtcattagttcatagcccatatatggagttccgcgttacataacttacggtaaatggcccgcctggctgaccgcccaacgacccccgcccattgacgtcaataatgacgtatgttcccatagtaacgccaatagggactttccattgacgtcaatgggtggagtatttacggtaaactgcccacttggcagtacatcaagtgtatcatatgccaagtacgccccctattgacgtcaatgacggtaaatggcccgcctggcattatgcccagtacatgaccttatgggactttcctacttggcagtacatctacgtattagtcatcgctattaccatgtcgaggccacgttctgcttcactctccccatctcccccccctccccacccccaattttgtatttatttattttttaattattttgtgcagcgatgggggcggggggggggggcgcgcgccaggcggggcggggcggggcgaggggcggggcggggcgaggcggagaggtgcggcggcagccaatcagagcggcgcgctccgaaagtttccttttatggcgaggcggcggcggcggcggccctataaaaagcgaagcgcgcggcgggcgggagcaagcttcgtttagtgaaccgtcagatcgcctggagacgccatccacgctgttttgacctccatagaagacaccgggaccgatccagcctccgcggattcgaatcccggccgggaacggtgcattggaacgcggattccccgtgccaagagtgacgtaagtaccgcctatagagtctataggcccacaaaaaatgctttcttcttttaatatacttttttgtttatcttatttctaatactttccctaatctctttctttcagggcaataatgatacaatgtatcatgcctctttgcaccattctaaagaataacagtgataatttctgggttaaggcaatagcaatatttctgcatataaatatttctgcatataaattgtaactgatgtaagaggtttcatattgctaatagcagctacaatccagctaccattctgcttttattttatggttgggataaggctggattattctgagtccaagctaggcccttttgctaatcatgttcatacctcttatcttcctcccacagctcctgggcaacgtgctggtctgtgtgctggcccatcactttggcaaagaattgggattcgaaccggtgccgccaccatggagttttcaagtccttccagagaggaatgtcccaagcctttgagtagggtaagcatcatggctggcagcctcacaggattgcttctacttcaggcagtgtcgtgggcatcaggtgcccgcccctgcatccctaaaagcttcggctacagctcggtggtgtgtgtctgcaatgccacatactgtgactcctttgaccccccgacctttcctgcccttggtaccttcagccgctatgagagtacacgcagtgggcgacggatggagctgagtatggggcccatccaggctaatcacacgggcacaggcctgctactgaccctgcagccagaacagaagttccagaaagtgaagggatttggaggggccatgacagatgctgctgctctcaacatccttgccctgtcaccccctgcccaaaatttgctacttaaatcgtacttctctgaagaaggaatcggatataacatcatccgggtacccatggccagctgtgacttctccatccgcacctacacctatgcagacacccctgatgatttccagttgcacaacttcagcctcccagaggaagataccaagctcaagatacccctgattcaccgagccctgcagttggcccagcgtcccgtttcactccttgccagcccctggacatcacccacttggctcaagaccaatggagcggtgaatgggaaggggtcactcaagggacagcccggagacatctaccaccagacctgggccagatactttgtgaagttcctggatgcctatgctgagcacaagttacagttctgggcagtgacagctgaaaatgagccttctgctgggctgttgagtggataccccttccagtgcctgggcttcacccctgaacatcagcgagacttcattgcccgtgacctaggtcctaccctcgccaacagtactcaccacaatgtccgcctactcatgctggatgaccaacgcttgctgctgccccactgggcaaaggtggtactgacagacccagaagcagctaaatatgttcatggcattgctgtacattggtacctggactttctggctccagccaaagccaccctaggggagacacaccgcctgttccccaacaccatgctctttgcctcagaggcctgtgtgggctccaagttctgggagcagagtgtgcggctaggctcctgggatcgagggatgcagtacagccacagcatcatcacgaacctcctgtaccatgtggtcggctggaccgactggaaccttgccctgaaccccgaaggaggacccaattgggtgcgtaactttgtcgacagtcccatcattgtagacatcaccaaggacacgttttacaaacagcccatgttctaccaccttggccacttcagcaagttcattcctgagggctcccagagagtggggctggttgccagtcagaagaacgacctggacgcagtggcactgatgcatcccgatggctctgctgttgtggtcgtgctaaaccgctcctctaaggatgtgcctcttaccatcaaggatcctgctgtgggcttcctggagacaatctcacctggctactccattcacacctacctgtggcgtcgccagtagtaacctcgaggtaccaggagctcttctcctagtgaattctaccagtgccatagatagttaagtgaattctaccagtgccatagatagttaagtgaattctaccagtgccatagatagttaagtgaattctaccagtgccatactgcagtcaggtctataccatcgaggacggggtgaactacgcctgaggatccgatctttttccctctgccaaaaattatggggacatcatgaagccccttgagcatctgacttctggctaataaaggaaatttattttcattgcaatagtgtgttggaattttttgtgtctctcactcggcctaggtagataagtagcatggcgggttaatcattaactacaaggaacccctagtgatggagttggccactccctctctgcgcgctcgctcgctcactgaggccgggcgaccaaaggtcgcccgacgcccgggctttgcccgggcggcctcagtgagcgagcgagcgcgcag

SEQ ID NO: 1871 - protein, 50 aa, synthetic construct
  VARIANT 1..50: note = This sequence may encompass 1-10 GGGGS repeating units
GGGGSGGGGSGGGGSGGGGSGGGGSGGGGSGGGGSGGGGSGGGGSGGGGS

SEQ ID NO: 1872 - protein, 40 aa, synthetic construct
  VARIANT 1..40: note = This sequence may encompass 0-8 GGGGS repeating units
GGGGSGGGGSGGGGSGGGGSGGGGSGGGGSGGGGSGGGGS

SEQ ID NO: 1873 - DNA, 45 bp, synthetic construct; identical to SEQ ID NO: 26
  source 1..45: mol_type = other DNA

SEQ ID NO: 1874 - DNA, 1184 bp, synthetic construct
  source 1..1184: mol_type = other DNA
cgtgaggctccggtgcccgtcagtgggcagagcgcacatcgcccacagtccccgagaagttggggggaggggtcggcaattgaaccggtgcctagagaaggtggcgcggggtaaactgggaaagtgatgtcgtgtactggctccgcctttttcccgagggtgggggagaaccgtatataagtgcagtagtcgccgtgaacgttctttttcgcaacgggtttgccgccagaacacaggtaagtgccgtgtgtggttcccgcgggcctggcctctttacgggttatggcccttgcgtgccttgaattacttccacctggctgcagtacgtgattcttgatcccgagcttcgggttggaagtgggtgggagagttcgaggccttgcgcttaaggagccccttcgcctcgtgcttgagttgaggcctggcctgggcgctggggccgccgcgtgcgaatctggtggcaccttcgcgcctgtctcgctgctttcgataagtctctagccatttaaaatttttgatgacctgctgcgacgctttttttctggcaagatagtcttgtaaatgcgggccaagatctgcacactggtatttcggtttttggggccgcgggcggcgacggggcccgtgcgtcccagcgcacatgttcggcgaggcggggcctgcgagcgcggccaccgagaatcggacgggggtagtctcaagctggccggcctgctctggtgcctggcctcgcgccgccgtgtatcgccccgccctgggcggcaaggctggcccggtcggcaccagttgcgtgagcggaaagatggccgcttcccggccctgctgcagggagctcaaaatggaggacgcggcgctcgggagagcgggcgggtgagtcacccacacaaaggaaaagggcctttccgtcctcagccgtcgcttcatgtgactccacggagtaccgggcgccgtccaggcacctcgattagttctcgagcttttggagtacgtcgtctttaggttggggggaggggttttatgcgatggagtttccccacactgagtgggtggagactgaagttaggccagcttggcacttgatgtaattctccttggaatttgccctttttgagtttggatcttggttcattctcaagcctcagacagtggttcaaagtttttttcttccatttcaggtgtcgtga

SEQ ID NO: 1875 - DNA, 227 bp, synthetic construct
  source 1..227: mol_type = other DNA
gcccgtcagtgggcagagcgcacatcgcccacagtccccgagaagttggggggaggggtcggcaattgaaccggtgcctagagaaggtggcgcggggtaaactgggaaagtgatgtcgtgtactggctccgcctttttcccgagggtgggggagaaccgtatataagtgcagtagtcgccgtgaacgttctttttcgcaacgggtttgccgccagaacacgcgtaag

SEQ ID NO: 1876 - DNA, 16 bp, synthetic construct
  source 1..16: mol_type = other DNA
ggtggagaagagcatg

SEQ ID NO: 1877 - DNA, 27 bp, synthetic construct
  source 1..27: mol_type = other DNA
gtcatcactgaggtggagaagagcatg

SEQ ID NO: 1878 - DNA, 222 bp, synthetic construct
  source 1..222: mol_type = other DNA
gcccgtcagtgggcagagcgcacatcgcccacagtccccgagaagttggggggaggggtcggcaattgaaccggtgcctagagaaggtggcgcggggtaaactgggaaagtgatgtcgtgtactggctccgcctttttcccgagggtgggggagaaccgtatataagtgcagtagtcgccgtgaacgttctttttcgcaacgggtttgccgccagaacacag

SEQ ID NO: 1879 - DNA, 222 bp, synthetic construct
  source 1..222: mol_type = other DNA
gcccgtcagtgggcagagcgcacatcgcccacagtccccgagaagttggggggaggggtcggcaattgaaccggtgcctagagaaggtggcgcggggtaaactgggaaagtgatgtcgtgtactggctccgcctttttcccgagggtgggggagaaccgtatataagtgcagtagtcgccgtgaacgttctttttcgcaacgggtttgccgccagaacacgc

SEQ ID NO: 1880 - DNA, 229 bp, synthetic construct
  source 1..229: mol_type = other DNA
gtgcccgtcagtgggcagagcgcacatcgcccacagtccccgagaagttggggggaggggtcggcaattgaaccggtgcctagagaaggtggcgcggggtaaactgggaaagtgatgtcgtgtactggctccgcctttttcccgagggtgggggagaaccgtatataagtgcagtagtcgccgtgaacgttctttttcgcaacgggtttgccgccagaacacgcgtaag

SEQ ID NO: 1881 - DNA, 235 bp, synthetic construct
  source 1..235: mol_type = other DNA
gctccggtgcccgtcagtgggcagagcgcacatcgcccacagtccccgagaagttggggggaggggtcggcaattgaaccggtgcctagagaaggtggcgcggggtaaactgggaaagtgatgtcgtgtactggctccgcctttttcccgagggtgggggagaaccgtatataagtgcagtagtcgccgtgaacgttctttttcgcaacgggtttgccgccagaacacgcgtaag

SEQ ID NO: 1882 - DNA, 241 bp, synthetic construct
  source 1..241: mol_type = other DNA
cgtgaggctccggtgcccgtcagtgggcagagcgcacatcgcccacagtccccgagaagttggggggaggggtcggcaattgaaccggtgcctagagaaggtggcgcggggtaaactgggaaagtgatgtcgtgtactggctccgcctttttcccgagggtgggggagaaccgtatataagtgcagtagtcgccgtgaacgttctttttcgcaacgggtttgccgccagaacacgcgtaag

SEQ ID NO: 1883 - DNA, 236 bp, synthetic construct
  source 1..236: mol_type = other DNA
cgtgaggctccggtgcccgtcagtgggcagagcgcacatcgcccacagtccccgagaagttggggggaggggtcggcaattgaaccggtgcctagagaaggtggcgcggggtaaactgggaaagtgatgtcgtgtactggctccgcctttttcccgagggtgggggagaaccgtatataagtgcagtagtcgccgtgaacgttctttttcgcaacgggtttgccgccagaacacag

SEQ ID NO: 1884 - DNA, 246 bp, synthetic construct
  source 1..246: mol_type = other DNA
gcatgcgtgaggctccggtgcccgtcagtgggcagagcgcacatcgcccacagtccccgagaagttggggggaggggtcggcaattgaaccggtgcctagagaaggtggcgcggggtaaactgggaaagtgatgtcgtgtactggctccgcctttttcccgagggtgggggagaaccgtatataagtgcagtagtcgccgtgaacgttctttttcgcaacgggtttgccgccagaacacgcgtaag

SEQ ID NO: 1885 - DNA, 241 bp, synthetic construct
  source 1..241: mol_type = other DNA
gcatgcgtgaggctccggtgcccgtcagtgggcagagcgcacatcgcccacagtccccgagaagttggggggaggggtcggcaattgaaccggtgcctagagaaggtggcgcggggtaaactgggaaagtgatgtcgtgtactggctccgcctttttcccgagggtgggggagaaccgtatataagtgcagtagtcgccgtgaacgttctttttcgcaacgggtttgccgccagaacacag

SEQ ID NO: 1886 - DNA, 257 bp, synthetic construct
  source 1..257: mol_type = other DNA
ggtggagaagagcatgcgtgaggctccggtgcccgtcagtgggcagagcgcacatcgcccacagtccccgagaagttggggggaggggtcggcaattgaaccggtgcctagagaaggtggcgcggggtaaactgggaaagtgatgtcgtgtactggctccgcctttttcccgagggtgggggagaaccgtatataagtgcagtagtcgccgtgaacgttctttttcgcaacgggtttgccgccagaacacgcgtaag

SEQ ID NO: 1887 - DNA, 252 bp, synthetic construct
  source 1..252: mol_type = other DNA
ggtggagaagagcatgcgtgaggctccggtgcccgtcagtgggcagagcgcacatcgcccacagtccccgagaagttggggggaggggtcggcaattgaaccggtgcctagagaaggtggcgcggggtaaactgggaaagtgatgtcgtgtactggctccgcctttttcccgagggtgggggagaaccgtatataagtgcagtagtcgccgtgaacgttctttttcgcaacgggtttgccgccagaacacag

SEQ ID NO: 1888 - DNA, 268 bp, synthetic construct
  source 1..268: mol_type = other DNA
gtcatcactgaggtggagaagagcatgcgtgaggctccggtgcccgtcagtgggcagagcgcacatcgcccacagtccccgagaagttggggggaggggtcggcaattgaaccggtgcctagagaaggtggcgcggggtaaactgggaaagtgatgtcgtgtactggctccgcctttttcccgagggtgggggagaaccgtatataagtgcagtagtcgccgtgaacgttctttttcgcaacgggtttgccgccagaacacgcgtaag

SEQ ID NO: 1889 - DNA, 263 bp, synthetic construct
  source 1..263: mol_type = other DNA
gtcatcactgaggtggagaagagcatgcgtgaggctccggtgcccgtcagtgggcagagcgcacatcgcccacagtccccgagaagttggggggaggggtcggcaattgaaccggtgcctagagaaggtggcgcggggtaaactgggaaagtgatgtcgtgtactggctccgcctttttcccgagggtgggggagaaccgtatataagtgcagtagtcgccgtgaacgttctttttcgcaacgggtttgccgccagaacacag

SEQ ID NO: 1890-3622 - skipped (1733 entries)

SEQ ID NO: 3623 - DNA, 2232 bp, synthetic construct
  source 1..2232: mol_type = other DNA
atggctgccgatggttatcttccagattggctcgaggacaaccttagtgaaggaattcgcgagtggtgggctttgaaacctggagcccctcaacccaaggcaaatcaacaacatcaagacaacgctcgaggtcttgtgcttccgggttacaaataccttggacccggcaacggactcgacaagggggagccggtcaacgcagcagacgcggcggccctcgagcacgacaaggcctacgaccagcagctcaaggccggagacaacccgtacctcaagtacaaccacgccgacgccgagttccaggagcggctcaaagaagatacgtcttttgggggcaacctcgggcgagcagtcttccaggccaaaaagaggcttcttgaacctcttggtctggttgaggaagcggctaagacggctcctggaaagaagaggcctgtagagcagtctcctcaggaaccggactcctccgcgggtattggcaaatcgggtgcacagcccgctaaaaagagactcaatttcggtcagactggcgacacagagtcagtcccagaccctcaaccaatcggagaacctcccgcagccccctcaggtgtgggatctcttacaatggcttcaggtggtggcgcaccagtggcagacaataacgaaggtgccgatggagtgggtagttcctcgggaaattggcattgcgattcccaatggctgggggacagagtcatcaccaccagcacccgaacctgggccctgcccacctacaacaatcacctctacaagcaaatctccaacagcacatctggaggatcttcaaatgacaacgcctacttcggctacagcaccccctgggggtattttgacttcaacagattccactgccacttctcaccacgtgactggcagcgactcatcaacaacaactggggattccggcctaagcgactcaacttcaagctcttcaacattcaggtcaaagaggttacggacaacaatggagtcaagaccatcgccaataaccttaccagcacggtccaggtcttcacggactcagactatcagctcccgtacgtgctcgggtcggctcacgagggctgcctcccgccgttcccagcggacgttttcatgattcctcagtacgggtatctgacgcttaatgatggaagccaggccgtgggtcgttcgtccttttactgcctggaatatttcccgtcgcaaatgctaagaacgggtaacaacttccagttcagctacgagtttgagaacgtacctttccatagcagctacgctcacagccaaagcctggaccgactaatgaatccactcatcgaccaatacttgtactatctctcaaagactattaacggttctggacagaatcaacaaacgctaaaattcagtgtggccggacccagcaacatggctgtccagggaagaaactacatacctggacccagctaccgacaacaacgtgtctcaaccactgtgactcaaaacaacaacagcgaatttgcttggcctggagcttcttcttgggctctcaatggacgtaatagcttgatgaatcctggacctgctatggccagccacaaagaaggagaggaccgtttctttcctttgtctggatctttaatttttggcaaacaaggaactggaagagacaacgtggatgcggacaaagtcatgataaccaacgaagaagaaattaaaactactaacccggtagcaacggagtcctatggacaagtggccacaaaccaccagagtccgcttaatggtgccgtccatctttatgctcaggcgcagaccggctgggttcaaaaccaaggaatacttccgggtatggtttggcaggacagagatgtgtacctgcaaggacccatttgggccaaaattcctcacacggacggcaactttcacccttctccgctgatgggagggtttggaatgaagcacccgcctcctcagatcctcatcaaaaacacacctgtacctgccgatcctccaacggccttcaacaaggacaagctgaactctttcatcacccagtattctactggccaagtcagcgtggagatcgagtgggagctgcagaaggaaaacagcaagcggtggaacccggagatccagtacacttccaactattacaagtctaataatgttgaatttgctgttaatactgaaggtgtatatagtgaaccccgccccattggcaccagatacctgactcgtaatctgtaa

SEQ ID NO: 3624 - DNA, 2232 bp, synthetic construct
  source 1..2232: mol_type = other DNA
atggctgccgatggttatcttccagattggctcgaggacaaccttagtgaaggaattcgcgagtggtgggctttgaaacctggagcccctcaacccaaggcaaatcaacaacatcaagacaacgctcgaggtcttgtgcttccgggttacaaataccttggacccggcaacggactcgacaagggggagccggtcaacgcagcagacgcggcggccctcgagcacgacaaggcctacgaccagcagctcaaggccggagacaacccgtacctcaagtacaaccacgccgacgccgagttccaggagcggctcaaagaagatacgtcttttgggggcaacctcgggcgagcagtcttccaggccaaaaagaggcttcttgaacctcttggtctggttgaggaagcggctaagacggctcctggaaagaagaggcctgtagagcagtctcctcaggaaccggactcctccgcgggtattggcaaatcgggtgcacagcccgctaaaaagagactcaatttcggtcagactggcgacacagagtcagtcccagaccctcaaccaatcggagaacctcccgcagccccctcaggtgtgggatctcttacaatggcttcaggtggtggcgcaccagtggcagacaataacgaaggtgccgatggagtgggtagttcctcgggaaattggcattgcgattcccaatggctgggggacagagtcatcaccaccagcacccgaacctgggccctgcccacctacaacaatcacctctacaagcaaatctccaacagcacatctggaggatcttcaaatgacaacgcctacttcggctacagcaccccctgggggtattttgacttcaacagattccactgccacttctcaccacgtgactggcagcgactcatcaacaacaactggggattccggcctaagcgactcaacttcaagctcttcaacattcaggtcaaagaggttacggacaacaatggagtcaagaccatcgccaataaccttaccagcacggtccaggtcttcacggactcagactatcagctcccgtacgtgctcgggtcggctcacgagggctgcctcccgccgttcccagcggacgttttcatgattcctcagtacgggtatctgacgcttaatgatggaagccaggccgtgggtcgttcgtccttttactgcctggaatatttcccgtcgcaaatgctaagaacgggtaacaacttccagttcagctacgagtttgagaacgtacctttccatagcagctacgctcacagccaaagcctggaccgactaatgaatccactcatcgaccaatacttgtactatctctcaaagactattaacggttctggacagaatcaacaaacgctaaaattcagtgtggccggacccagcaacatggctgtccagggaagaaactacatacctggacccagctaccgacaacaacgtgtctcaaccactgtgactcaaaacaacaacagcgaatttgcttggcctggagcttcttcttgggctctcaatggacgtaatagcttgatgaatcctggacctgctatggccagccacaaagaaggagaggaccgtttctttcctttgtctggatctttaatttttggcaaacaaggaactggaagagacaacgtggatgcggacaaagtcatgataaccaacgaagaagaaattaaaactactaacccggtagcaacggagtcctatggacaagtggccacaaaccaccagagtgcacaggctcgtgattctccgaagggttggcaggcgcagaccggctgggttcaaaaccaaggaatacttccgggtatggtttggcaggacagagatgtgtacctgcaaggacccatttgggccaaaattcctcacacggacggcaactttcacccttctccgctgatgggagggtttggaatgaagcacccgcctcctcagatcctcatcaaaaacacacctgtacctgccgatcctccaacggccttcaacaaggacaagctgaactctttcatcacccagtattctactggccaagtcagcgtggagatcgagtgggagctgcagaaggaaaacagcaagcggtggaacccggagatccagtacacttccaactattacaagtctaataatgttgaatttgctgttaatactgaaggtgtatatagtgaaccccgccccattggcaccagatacctgactcgtaatctgtaa

SEQ ID NO: 3625 - DNA, 2232 bp, synthetic construct
  source 1..2232: mol_type = other DNA
atggctgccgatggttatcttccagattggctcgaggacaaccttagtgaaggaattcgcgagtggtgggctttgaaacctggagcccctcaacccaaggcaaatcaacaacatcaagacaacgctcgaggtcttgtgcttccgggttacaaataccttggacccggcaacggactcgacaagggggagccggtcaacgcagcagacgcggcggccctcgagcacgacaaggcctacgaccagcagctcaaggccggagacaacccgtacctcaagtacaaccacgccgacgccgagttccaggagcggctcaaagaagatacgtcttttgggggcaacctcgggcgagcagtcttccaggccaaaaagaggcttcttgaacctcttggtctggttgaggaagcggctaagacggctcctggaaagaagaggcctgtagagcagtctcctcaggaaccggactcctccgcgggtattggcaaatcgggtgcacagcccgctaaaaagagactcaatttcggtcagactggcgacacagagtcagtcccagaccctcaaccaatcggagaacctcccgcagccccctcaggtgtgggatctcttacaatggcttcaggtggtggcgcaccagtggcagacaataacgaaggtgccgatggagtgggtagttcctcgggaaattggcattgcgattcccaatggctgggggacagagtcatcaccaccagcacccgaacctgggccctgcccacctacaacaatcacctctacaagcaaatctccaacagcacatctggaggatcttcaaatgacaacgcctacttcggctacagcaccccctgggggtattttgacttcaacagattccactgccacttctcaccacgtgactggcagcgactcatcaacaacaactggggattccggcctaagcgactcaacttcaagctcttcaacattcaggtcaaagaggttacggacaacaatggagtcaagaccatcgccaataaccttaccagcacggtccaggtcttcacggactcagactatcagctcccgtacgtgctcgggtcggctcacgagggctgcctcccgccgttcccagcggacgttttcatgattcctcagtacgggtatctgacgcttaatgatggaagccaggccgtgggtcgttcgtccttttactgcctggaatatttcccgtcgcaaatgctaagaacgggtaacaacttccagttcagctacgagtttgagaacgtacctttccatagcagctacgctcacagccaaagcctggaccgactaatgaatccactcatcgaccaatacttgtactatctctcaaagactattaacggttctggacagaatcaacaaacgctaaaattcagtgtggccggacccagcaacatggctgtccagggaagaaactacatacctggacccagctaccgacaacaacgtgtctcaaccactgtgactcaaaacaacaacagcgaatttgcttggcctggagcttcttcttgggctctcaatggacgtaatagcttgatgaatcctggacctgctatggccagccacaaagaaggagaggaccgtttctttcctttgtctggatctttaatttttggcaaacaaggaactggaagagacaacgtggatgcggacaaagtcatgataaccaacgaagaagaaattaaaactactaacccggtagcaacggagtcctatggacaagtggccacaaaccaccagagtgcacaggctcgtgattctccgaagggttggcaggcgcagaccggctgggttcaaaaccaaggaatacttccgggtatggtttggcaggacagagatgtgtacctgcaaggacccatttgggccaaaattcctcacacggacggcaactttcacccttctccgctgatgggagggtttggaatgaagcacccgcctcctcagatcctcatcaaaaacacacctgtacctgcggatcctccaacggccttcaacaaggacaagctgaactctttcatcacccagtattctactggccaagtcagcgtggagatcgagtgggagctgcagaaggaaaacagcaagcgctggaacccggagatccagtacacttccaactattacaagtctaataatgttgaatttgctgttaatactgaaggtgtatatagtgaaccccgccccattggcaccagatacctgactcgtaatctgtaa

SEQ ID NO: 3626 - DNA, 2232 bp, synthetic construct
  source 1..2232: mol_type = other DNA
atggctgccgatggttatcttccagattggctcgaggacaaccttagtgaaggaattcgcgagtggtgggctttgaaacctggagcccctcaacccaaggcaaatcaacaacatcaagacaacgctcgaggtcttgtgcttccgggttacaaataccttggacccggcaacggactcgacaagggggagccggtcaacgcagcagacgcggcggccctcgagcacgacaaggcctacgaccagcagctcaaggccggagacaacccgtacctcaagtacaaccacgccgacgccgagttccaggagcggctcaaagaagatacgtcttttgggggcaacctcgggcgagcagtcttccaggccaaaaagaggcttcttgaacctcttggtctggttgaggaagcggctaagacggctcctggaaagaagaggcctgtagagcagtctcctcaggaaccggactcctccgcgggtattggcaaatcgggtgcacagcccgctaaaaagagactcaatttcggtcagactggcgacacagagtcagtcccagaccctcaaccaatcggagaacctcccgcagccccctcaggtgtgggatctcttacaatggcttcaggtggtggcgcaccagtggcagacaataacgaaggtgccgatggagtgggtagttcctcgggaaattggcattgcgattcccaatggctgggggacagagtcatcaccaccagcacccgaacctgggccctgcccacctacaacaatcacctctacaagcaaatctccaacagcacatctggaggatcttcaaatgacaacgcctacttcggctacagcaccccctgggggtattttgacttcaacagattccactgccacttctcaccacgtgactggcagcgactcatcaacaacaactggggattccggcctaagcgactcaacttcaagctcttcaacattcaggtcaaagaggttacggacaacaatggagtcaagaccatcgccaataaccttaccagcacggtccaggtcttcacggactcagactatcagctcccgtacgtgctcgggtcggctcacgagggctgcctcccgccgttcccagcggacgttttcatgattcctcagtacgggtatctgacgcttaatgatggaagccaggccgtgggtcgttcgtccttttactgcctggaatatttcccgtcgcaaatgctaagaacgggtaacaacttccagttcagctacgagtttgagaacgtacctttccatagcagctacgctcacagccaaagcctggaccgactaatgaatccactcatcgaccaatacttgtactatctctcaaagactattaacggttctggacagaatcaacaaacgctaaaattcagtgtggccggacccagcaacatggctgtccagggaagaaactacatacctggacccagctaccgacaacaacgtgtctcaaccactgtgactcaaaacaacaacagcgaatttgcttggcctggagcttcttcttgggctctcaatggacgtaatagcttgatgaatcctggacctgctatggccagccacaaagaaggagaggaccgtttctttcctttgtctggatctttaatttttggcaaacaaggaactggaagagacaacgtggatgcggacaaagtcatgataaccaacgaagaagaaattaaaactactaacccggtagcaacggagtcctatggacaagtggccacaaaccaccagagtgcacaggcttattctacggatgtgaggatgcaggcgcagaccggctgggttcaaaaccaaggaatacttccgggtatggtttggcaggacagagatgtgtacctgcaaggacccatttgggccaaaattcctcacacggacggcaactttcacccttctccgctgatgggagggtttggaatgaagcacccgcctcctcagatcctcatcaaaaacacacctgtacctgccgatcctccaacggccttcaacaaggacaagctgaactctttcatcacccagtattctactggccaagtcagcgtggagatcgagtgggagctgcagaaggaaaacagcaagcggtggaacccggagatccagtacacttccaactattacaagtctaataatgttgaatttgctgttaatactgaaggtgtatatagtgaaccccgccccattggcaccagatacctgactcgtaatctgtaa

SEQ ID NO: 3627 - DNA, 2232 bp, synthetic construct
  source 1..2232: mol_type = other DNA
atggctgccgatggttatcttccagattggctcgaggacaaccttagtgaaggaattcgcgagtggtgggctttgaaacctggagcccctcaacccaaggcaaatcaacaacatcaagacaacgctcgaggtcttgtgcttccgggttacaaataccttggacccggcaacggactcgacaagggggagccggtcaacgcagcagacgcggcggccctcgagcacgacaaggcctacgaccagcagctcaaggccggagacaacccgtacctcaagtacaaccacgccgacgccgagttccaggagcggctcaaagaagatacgtcttttgggggcaacctcgggcgagcagtcttccaggccaaaaagaggcttcttgaacctcttggtctggttgaggaagcggctaagacggctcctggaaagaagaggcctgtagagcagtctcctcaggaaccggactcctccgcgggtattggcaaatcgggtgcacagcccgctaaaaagagactcaatttcggtcagactggcgacacagagtcagtcccagaccctcaaccaatcggagaacctcccgcagccccctcaggtgtgggatctcttacaatggcttcaggtggtggcgcaccagtggcagacaataacgaaggtgccgatggagtgggtagttcctcgggaaattggcattgcgattcccaatggctgggggacagagtcatcaccaccagcacccgaacctgggccctgcccacctacaacaatcacctctacaagcaaatctccaacagcacatctggaggatcttcaaatgacaacgcctacttcggctacagcaccccctgggggtattttgacttcaacagattccactgccacttctcaccacgtgactggcagcgactcatcaacaacaactggggattccggcctaagcgactcaacttcaagctcttcaacattcaggtcaaagaggttacggacaacaatggagtcaagaccatcgccaataaccttaccagcacggtccaggtcttcacggactcagactatcagctcccgtacgtgctcgggtcggctcacgagggctgcctcccgccgttcccagcggacgttttcatgattcctcagtacgggtatctgacgcttaatgatggaagccaggccgtgggtcgttcgtccttttactgcctggaatatttcccgtcgcaaatgctaagaacgggtaacaacttccagttcagctacgagtttgagaacgtacctttccatagcagctacgctcacagccaaagcctggaccgactaatgaatccactcatcgaccaatacttgtactatctctcaaagactattaacggttctggacagaatcaacaaacgctaaaattcagtgtggccggacccagcaacatggctgtccagggaagaaactacatacctggacccagctaccgacaacaacgtgtctcaaccactgtgactcaaaacaacaacagcgaatttgcttggcctggagcttcttcttgggctctcaatggacgtaatagcttgatgaatcctggacctgctatggccagccacaaagaaggagaggaccgtttctttcctttgtctggatctttaatttttggcaaacaaggaactggaagagacaacgtggatgcggacaaagtcatgataaccaacgaagaagaaattaaaactactaacccggtagcaacggagtcctatggacaagtggccacaaaccaccagagtgcacagattgttatgaattcgttgaaggctcaggcgcagaccggctgggttcaaaaccaaggaatacttccgggtatggtttggcaggacagagatgtgtacctgcaaggacccatttgggccaaaattcctcacacggacggcaactttcacccttctccgctgatgggagggtttggaatgaagcacccgcctcctcagatcctcatcaaaaacacacctgtacctgccgatcctccaacggccttcaacaaggacaagctgaactctttcatcacccagtattctactggccaagtcagcgtggagatcgagtgggagctgcagaaggaaaacagcaagcggtggaacccggagatccagtacacttccaactattacaagtctaataatgttgaatttgctgttaatactgaaggtgtatatagtgaaccccgccccattggcaccagatacctgactcgtaatctgtaa

SEQ ID NO: 3628 - DNA, 2232 bp, synthetic construct
  source 1..2232: mol_type = other DNA
atggctgccgatggttatcttccagattggctcgaggacaaccttagtgaaggaattcgcgagtggtgggctttgaaacctggagcccctcaacccaaggcaaatcaacaacatcaagacaacgctcgaggtcttgtgcttccgggttacaaataccttggacccggcaacggactcgacaagggggagccggtcaacgcagcagacgcggcggccctcgagcacgacaaggcctacgaccagcagctcaaggccggagacaacccgtacctcaagtacaaccacgccgacgccgagttccaggagcggctcaaagaagatacgtcttttgggggcaacctcgggcgagcagtcttccaggccaaaaagaggcttcttgaacctcttggtctggttgaggaagcggctaagacggctcctggaaagaagaggcctgtagagcagtctcctcaggaaccggactcctccgcgggtattggcaaatcgggtgcacagcccgctaaaaagagactcaatttcggtcagactggcgacacagagtcagtcccagaccctcaaccaatcggagaacctcccgcagccccctcaggtgtgggatctcttacaatggcttcaggtggtggcgcaccagtggcagacaataacgaaggtgccgatggagtgggtagttcctcgggaaattggcattgcgattcccaatggctgggggacagagtcatcaccaccagcacccgaacctgggccctgcccacctacaacaatcacctctacaagcaaatctccaacagcacatctggaggatcttcaaatgacaacgcctacttcggctacagcaccccctgggggtattttgacttcaacagattccactgccacttctcaccacgtgactggcagcgactcatcaacaacaactggggattccggcctaagcgactcaacttcaagctcttcaacattcaggtcaaagaggttacggacaacaatggagtcaagaccatcgccaataaccttaccagcacggtccaggtcttcacggactcagactatcagctcccgtacgtgctcgggtcggctcacgagggctgcctcccgccgttcccagcggacgttttcatgattcctcagtacgggtatctgacgcttaatgatggaagccaggccgtgggtcgttcgtccttttactgcctggaatatttcccgtcgcaaatgctaagaacgggtaacaacttccagttcagctacgagtttgagaacgtacctttccatagcagctacgctcacagccaaagcctggaccgactaatgaatccactcatcgaccaatacttgtactatctctcaaagactattaacggttctggacagaatcaacaaacgctaaaattcagtgtggccggacccagcaacatggctgtccagggaagaaactacatacctggacccagctaccgacaacaacgtgtctcaaccactgtgactcaaaacaacaacagcgaatttgcttggcctggagcttcttcttgggctctcaatggacgtaatagcttgatgaatcctggacctgctatggccagccacaaagaaggagaggaccgtttctttcctttgtctggatctttaatttttggcaaacaaggaactggaagagacaacgtggatgcggacaaagtcatgataaccaacgaagaagaaattaaaactactaacccggtagcaacggagtcctatggacaagtggccacaaaccaccagagtgcacaggctcgggagagtcctcgtgggctgcaggcgcagaccggctgggttcaaaaccaaggaatacttccgggtatggtttggcaggacagagatgtgtacctgcaaggacccatttgggccaaaattcctcacacggacggcaactttcacccttctccgctgatgggagggtttggaatgaagcacccgcctcctcagatcctcatcaaaaacacacctgtacctgccgatcctccaacggccttcaacaaggacaagctgaactctttcatcacccagtattctactggccaagtcagcgtggagatcgagtgggagctgcagaaggaaaacagcaagcggtggaacccggagatccagtacacttccaactattacaagtctaataatgttgaatttgctgttaatactgaaggtgtatatagtgaaccccgccccattggcaccagatacctgactcgtaatctgtaa

SEQ ID NO: 3629 - DNA, 2232 bp, synthetic construct
  source 1..2232: mol_type = other DNA
atggctgccgatggttatcttccagattggctcgaggacaaccttagtgaaggaattcgcgagtggtgggctttgaaacctggagcccctcaacccaaggcaaatcaacaacatcaagacaacgctcgaggtcttgtgcttccgggttacaaataccttggacccggcaacggactcgacaagggggagccggtcaacgcagcagacgcggcggccctcgagcacgacaaggcctacgaccagcagctcaaggccggagacaacccgtacctcaagtacaaccacgccgacgccgagttccaggagcggctcaaagaagatacgtcttttgggggcaacctcgggcgagcagtcttccaggccaaaaagaggcttcttgaacctcttggtctggttgaggaagcggctaagacggctcctggaaagaagaggcctgtagagcagtctcctcaggaaccggactcctccgcgggtattggcaaatcgggtgcacagcccgctaaaaagagactcaatttcggtcagactggcgacacagagtcagtcccagaccctcaaccaatcggagaacctcccgcagccccctcaggtgtgggatctcttacaatggcttcaggtggtggcgcaccagtggcagacaataacgaaggtgccgatggagtgggtagttcctcgggaaattggcattgcgattcccaatggctgggggacagagtcatcaccaccagcacccgaacctgggccctgcccacctacaacaatcacctctacaagcaaatctccaacagcacatctggaggatcttcaaatgacaacgcctacttcggctacagcaccccctgggggtattttgacttcaacagattccactgccacttctcaccacgtgactggcagcgactcatcaacaacaactggggattccggcctaagcgactcaacttcaagctcttcaacattcaggtcaaagaggttacggacaacaatggagtcaagaccatcgccaataaccttaccagcacggtccaggtcttcacggactcagactatcagctcccgtacgtgctcgggtcggctcacgagggctgcctcccgccgttcccagcggacgttttcatgattcctcagtacgggtatctgacgcttaatgatggaagccaggccgtgggtcgttcgtccttttactgcctggaatatttcccgtcgcaaatgctaagaacgggtaacaacttccagttcagctacgagtttgagaacgtacctttccatagcagctacgctcacagccaaagcctggaccgactaatgaatccactcatcgaccaatacttgtactatctctcaaagactattaacggttctggacagaatcaacaaacgctaaaattcagtgtggccggacccagcaacatggctgtccagggaagaaactacatacctggacccagctaccgacaacaacgtgtctcaaccactgtgactcaaaacaacaacagcgaatttgcttggcctggagcttcttcttgggctctcaatggacgtaatagcttgatgaatcctggacctgctatggccagccacaaagaaggagaggaccgtttctttcctttgtctggatctttaatttttggcaaacaaggaactggaagagacaacgtggatgcggacaaagtcatgataaccaacgaagaagaaattaaaactactaacccggtagcaacggagtcctatggacaagtggccacaaaccaccagagtgcacaggctagttttaatgatactagggctcaggcgcagaccggctgggttcaaaaccaaggaatacttccgggtatggtttggcaggacagagatgtgtacctgcaaggacccatttgggccaaaattcctcacacggacggcaactttcacccttctccgctgatgggagggtttggaatgaagcacccgcctcctcagatcctcatcaaaaacacacctgtacctgccgatcctccaacggccttcaacaaggacaagctgaactctttcatcacccagtattctactggccaagtcagcgtggagatcgagtgggagctgcagaaggaaaacagcaagcggtggaacccggagatccagtacacttccaactattacaagtctaataatgttgaatttgctgttaatactgaaggtgtatatagtgaaccccgccccattggcaccagatacctgactcgtaatctgtaa

SEQ ID NO: 3630 - DNA, 2232 bp, synthetic construct
  source 1..2232: mol_type = other DNA
atggctgccgatggttatcttccagattggctcgaggacaaccttagtgaaggaattcgcgagtggtgggctttgaaacctggagcccctcaacccaaggcaaatcaacaacatcaagacaacgctcgaggtcttgtgcttccgggttacaaataccttggacccggcaacggactcgacaagggggagccggtcaacgcagcagacgcggcggccctcgagcacgacaaggcctacgaccagcagctcaaggccggagacaacccgtacctcaagtacaaccacgccgacgccgagttccaggagcggctcaaagaagatacgtcttttgggggcaacctcgggcgagcagtcttccaggccaaaaagaggcttcttgaacctcttggtctggttgaggaagcggctaagacggctcctggaaagaagaggcctgtagagcagtctcctcaggaaccggactcctccgcgggtattggcaaatcgggtgcacagcccgctaaaaagagactcaatttcggtcagactggcgacacagagtcagtcccagaccctcaaccaatcggagaacctcccgcagccccctcaggtgtgggatctcttacaatggcttcaggtggtggcgcaccagtggcagacaataacgaaggtgccgatggagtgggtagttcctcgggaaattggcattgcgattcccaatggctgggggacagagtcatcaccaccagcacccgaacctgggccctgcccacctacaacaatcacctctacaagcaaatctccaacagcacatctggaggatcttcaaatgacaacgcctacttcggctacagcaccccctgggggtattttgacttcaacagattccactgccacttctcaccacgtgactggcagcgactcatcaacaacaactggggattccggcctaagcgactcaacttcaagctcttcaacattcaggtcaaagaggttacggacaacaatggagtcaagaccatcgccaataaccttaccagcacggtccaggtcttcacggactcagactatcagctcccgtacgtgctcgggtcggctcacgagggctgcctcccgccgttcccagcggacgttttcatgattcctcagtacgggtatctgacgcttaatgatggaagccaggccgtgggtcgttcgtccttttactgcctggaatatttcccgtcgcaaatgctaagaacgggtaacaacttccagttcagctacgagtttgagaacgtacctttccatagcagctacgctcacagccaaagcctggaccgactaatgaatccactcatcgaccaatacttgtactatctctcaaagactattaacggttctggacagaatcaacaaacgctaaaattcagtgtggccggacccagcaacatggctgtccagggaagaaactacatacctggacccagctaccgacaacaacgtgtctcaaccactgtgactcaaaacaacaacagcgaatttgcttggcctggagcttcttcttgggctctcaatggacgtaatagcttgatgaatcctggacctgctatggccagccacaaagaaggagaggaccgtttctttcctttgtctggatctttaatttttggcaaacaaggaactggaagagacaacgtggatgcggacaaagtcatgataaccaacgaagaagaaattaaaactactaacccggtagcaacggagtcctatggacaagtggccacaaaccaccagagtggtggtacgttggccgtcgtgtcgcttgctcaggcgcagaccggctgggttcaaaaccaaggaatacttccgggtatggtttggcaggacagagatgtgtacctgcaaggacccatttgggccaaaattcctcacacggacggcaactttcacccttctccgctgatgggagggtttggaatgaagcacccgcctcctcagatcctcatcaaaaacacacctgtacctgccgatcctccaacggccttcaacaaggacaagctgaactctttcatcacccagtattctactggccaagtcagcgtggagatcgagtgggagctgcagaaggaaaacagcaagcggtggaacccggagatccagtacacttccaactattacaagtctaataatgttgaatttgctgttaatactgaaggtgtatatagtgaaccccgccccattggcaccagatacctgactcgtaatctgtaa

SEQ ID NO: 3631 - DNA, 2232 bp, synthetic construct
  source 1..2232: mol_type = other DNA
atggctgccgatggttatcttccagattggctcgaggacaaccttagtgaaggaattcgcgagtggtgggctttgaaacctggagcccctcaacccaaggcaaatcaacaacatcaagacaacgctcgaggtcttgtgcttccgggttacaaataccttggacccggcaacggactcgacaagggggagccggtcaacgcagcagacgcggcggccctcgagcacgacaaggcctacgaccagcagctcaaggccggagacaacccgtacctcaagtacaaccacgccgacgccgagttccaggagcggctcaaagaagatacgtcttttgggggcaacctcgggcgagcagtcttccaggccaaaaagaggcttcttgaacctcttggtctggttgaggaagcggctaagacggctcctggaaagaagaggcctgtagagcagtctcctcaggaaccggactcctccgcgggtattggcaaatcgggtgcacagcccgctaaaaagagactcaatttcggtcagactggcgacacagagtcagtcccagaccctcaaccaatcggagaacctcccgcagccccctcaggtgtgggatctcttacaatggcttcaggtggtggcgcaccagtggcagacaataacgaaggtgccgatggagtgggtagttcctcgggaaattggcattgcgattcccaatggctgggggacagagtcatcaccaccagcacccgaacctgggccctgcccacctacaacaatcacctctacaagcaaatctccaacagcacatctggaggatcttcaaatgacaacgcctacttcggctacagcaccccctgggggtattttgacttcaacagattccactgccacttctcaccacgtgactggcagcgactcatcaacaacaactggggattccggcctaagcgactcaacttcaagctcttcaacattcaggtcaaagaggttacggacaacaatggagtcaagaccatcgccaataaccttaccagcacggtccaggtcttcacggactcagactatcagctcccgtacgtgctcgggtcggctcacgagggctgcctcccgccgttcccagcggacgttttcatgattcctcagtacgggtatctgacgcttaatgatggaagccaggccgtgggtcgttcgtccttttactgcctggaatatttcccgtcgcaaatgctaagaacgggtaacaacttccagttcagctacgagtttgagaacgtacctttccatagcagctacgctcacagccaaagcctggaccgactaatgaatccactcatcgaccaatacttgtactatctctcaaagactattaacggttctggacagaatcaacaaacgctaaaattcagtgtggccggacccagcaacatggctgtccagggaagaaactacatacctggacccagctaccgacaacaacgtgtctcaaccactgtgactcaaaacaacaacagcgaatttgcttggcctggagcttcttcttgggctctcaatggacgtaatagcttgatgaatcctggacctgctatggccagccacaaagaaggagaggaccgtttctttcctttgtctggatctttaatttttggcaaacaaggaactggaagagacaacgtggatgcggacaaagtcatgataaccaacgaagaagaaattaaaactactaacccggtagcaacggagtcctatggacaagtggccacaaaccaccagagtgcacaggcttatgggttgccgaagggtcctcaggcgcagaccggctgggttcaaaaccaaggaatacttccgggtatggtttggcaggacagagatgtgtacctgcaaggacccatttgggccaaaattcctcacacggacggcaactttcacccttctccgctgatgggagggtttggaatgaagcacccgcctcctcagatcctcatcaaaaacacacctgtacctgccgatcctccaacggccttcaacaaggacaagctgaactctttcatcacccagtattctactggccaagtcagcgtggagatcgagtgggagctgcagaaggaaaacagcaagcggtggaacccggagatccagtacacttccaactattacaagtctaataatgttgaatttgctgttaatactgaaggtgtatatagtgaaccccgccccattggcaccagatacctgactcgtaatctgtaa

SEQ ID NO: 3632 - DNA, 2232 bp, synthetic construct
  source 1..2232: mol_type = other DNA
atggctgccgatggttatcttccagattggctcgaggacaaccttagtgaaggaattcgcgagtggtgggctttgaaacctggagcccctcaacccaaggcaaatcaacaacatcaagacaacgctcgaggtcttgtgcttccgggttacaaataccttggacccggcaacggactcgacaagggggagccggtcaacgcagcagacgcggcggccctcgagcacgacaaggcctacgaccagcagctcaaggccggagacaacccgtacctcaagtacaaccacgccgacgccgagttccaggagcggctcaaagaagatacgtcttttgggggcaacctcgggcgagcagtcttccaggccaaaaagaggcttcttgaacctcttggtctggttgaggaagcggctaagacggctcctggaaagaagaggcctgtagagcagtctcctcaggaaccggactcctccgcgggtattggcaaatcgggtgcacagcccgctaaaaagagactcaatttcggtcagactggcgacacagagtcagtcccagaccctcaaccaatcggagaacctcccgcagccccctcaggtgtgggatctcttacaatggcttcaggtggtggcgcaccagtggcagacaataacgaaggtgccgatggagtgggtagttcctcgggaaattggcattgcgattcccaatggctgggggacagagtcatcaccaccagcacccgaacctgggccctgcccacctacaacaatcacctctacaagcaaatctccaacagcacatctggaggatcttcaaatgacaacgcctacttcggctacagcaccccctgggggtattttgacttcaacagattccactgccacttctcaccacgtgactggcagcgactcatcaacaacaactggggattccggcctaagcgactcaacttcaagctcttcaacattcaggtcaaagaggttacggacaacaatggagtcaagaccatcgccaataaccttaccagcacggtccaggtcttcacggactcagactatcagctcccgtacgtgctcgggtcggctcacgagggctgcctcccgccgttcccagcggacgttttcatgattcctcagtacgggtatctgacgcttaatgatggaagccaggccgtgggtcgttcgtccttttactgcctggaatatttcccgtcgcaaatgctaagaacgggtaacaacttccagttcagctacgagtttgagaacgtacctttccatagcagctacgctcacagccaaagcctggaccgactaatgaatccactcatcgaccaatacttgtactatctctcaaagactattaacggttctggacagaatcaacaaacgctaaaattcagtgtggccggacccagcaacatggctgtccagggaagaaactacatacctggacccagctaccgacaacaacgtgtctcaaccactgtgactcaaaacaacaacagcgaatttgcttggcctggagcttcttcttgggctctcaatggacgtaatagcttgatgaatcctggacctgctatggccagccacaaagaaggagaggaccgtttctttcctttgtctggatctttaatttttggcaaacaaggaactggaagagacaacgtggatgcggacaaagtcatgataaccaacgaagaagaaattaaaactactaacccggtagcaacggagtcctatggacaagtggccacaaaccaccagagtgcacaggcttcgactgggacgcttcggcttcaggcgcagaccggctgggttcaaaaccaaggaatacttccgggtatggtttggcaggacagagatgtgtacctgcaaggacccatttgggccaaaattcctcacacggacggcaactttcacccttctccgctgatgggagggtttggaatgaagcacccgcctcctcagatcctcatcaaaaacacacctgtacctgccgatcctccaacggccttcaacaaggacaagctgaactctttcatcacccagtattctactggccaagtcagcgtggagatcgagtgggagctgcagaaggaaaacagcaagcggtggaacccggagatccagtacacttccaactattacaagtctaataatgttgaatttgctgttaatactgaaggtgtatatagtgaaccccgccccattggcaccagatacctgactcgtaatctgtaa

SEQ ID NO: 3633 - DNA, 2232 bp, synthetic construct
  source 1..2232: mol_type = other DNA
atggctgccgatggttatcttccagattggctcgaggacaaccttagtgaaggaattcgcgagtggtgggctttgaaacctggagcccctcaacccaaggcaaatcaacaacatcaagacaacgctcgaggtcttgtgcttccgggttacaaataccttggacccggcaacggactcgacaagggggagccggtcaacgcagcagacgcggcggccctcgagcacgacaaggcctacgaccagcagctcaaggccggagacaacccgtacctcaagtacaaccacgccgacgccgagttccaggagcggctcaaagaagatacgtcttttgggggcaacctcgggcgagcagtcttccaggccaaaaagaggcttcttgaacctcttggtctggttgaggaagcggctaagacggctcctggaaagaagaggcctgtagagcagtctcctcaggaaccggactcctccgcgggtattggcaaatcgggtgcacagcccgctaaaaagagactcaatttcggtcagactggcgacacagagtcagtcccagaccctcaaccaatcggagaacctcccgcagccccctcaggtgtgggatctcttacaatggcttcaggtggtggcgcaccagtggcagacaataacgaaggtgccgatggagtgggtagttcctcgggaaattggcattgcgattcccaatggctgggggacagagtcatcaccaccagcacccgaacctgggccctgcccacctacaacaatcacctctacaagcaaatctccaacagcacatctggaggatcttcaaatgacaacgcctacttcggctacagcaccccctgggggtattttgacttcaacagattccactgccacttctcaccacgtgactggcagcgactcatcaacaacaactggggattccggcctaagcgactcaacttcaagctcttcaacattcaggtcaaagaggttacggacaacaatggagtcaagaccatcgccaataaccttaccagcacggtccaggtcttcacggactcagactatcagctcccgtacgtgctcgggtcggctcacgagggctgcctcccgccgttcccagcggacgttttcatgattcctcagtacgggtatctgacgcttaatgatggaagccaggccgtgggtcgttcgtccttttactgcctggaatatttcccgtcgcaaatgctaagaacgggtaacaacttccagttcagctacgagtttgagaacgtacctttccatagcagctacgctcacagccaaagcctggaccgactaatgaatccactcatcgaccaatacttgtactatctctcaaagactattaacggttctggacagaatcaacaaacgctaaaattcagtgtggccggacccagcaacatggctgtccagggaagaaactacatacctggacccagctaccgacaacaacgtgtctcaaccactgtgactcaaaacaacaacagcgaatttgcttggcctggagcttcttcttgggctctcaatggacgtaatagcttgatgaatcctggacctgctatggccagccacaaagaaggagaggaccgtttctttcctttgtctggatctttaatttttggcaaacaaggaactggaagagacaacgtggatgcggacaaagtcatgataaccaacgaagaagaaattaaaactactaacccggtagcaacggagtcctatggacaagtggccacaaaccaccagagtgcgcaggcgtattcgacggatgagaggatgcaggcgcagaccggctgggttcaaaaccaaggaatacttccgggtatggtttggcaggacagagatgtgtacctgcaaggacccatttgggccaaaattcctcacacggacggcaactttcacccttctccgctgatgggagggtttggaatgaagcacccgcctcctcagatcctcatcaaaaacacacctgtacctgccgatcctccaacggccttcaacaaggacaagctgaactctttcatcacccagtattctactggccaagtcagcgtggagatcgagtgggagctgcagaaggaaaacagcaagcggtggaacccggagatccagtacacttccaactattacaagtctaataatgttgaatttgctgttaatactgaaggtgtatatagtgaaccccgccccattggcaccagatacctgactcgtaatctgtaa

SEQ ID NO: 3634 - DNA, 2232 bp, synthetic construct
  source 1..2232: mol_type = other DNA
atggctgccgatggttatcttccagattggctcgaggacaaccttagtgaaggaattcgcgagtggtgggctttgaaacctggagcccctcaacccaaggcaaatcaacaacatcaagacaacgctcgaggtcttgtgcttccgggttacaaataccttggacccggcaacggactcgacaagggggagccggtcaacgcagcagacgcggcggccctcgagcacgacaaggcctacgaccagcagctcaaggccggagacaacccgtacctcaagtacaaccacgccgacgccgagttccaggagcggctcaaagaagatacgtcttttgggggcaacctcgggcgagcagtcttccaggccaaaaagaggcttcttgaacctcttggtctggttgaggaagcggctaagacggctcctggaaagaagaggcctgtagagcagtctcctcaggaaccggactcctccgcgggtattggcaaatcgggtgcacagcccgctaaaaagagactcaatttcggtcagactggcgacacagagtcagtcccagaccctcaaccaatcggagaacctcccgcagccccctcaggtgtgggatctcttacaatggcttcaggtggtggcgcaccagtggcagacaataacgaaggtgccgatggagtgggtagttcctcgggaaattggcattgcgattcccaatggctgggggacagagtcatcaccaccagcacccgaacctgggccctgcccacctacaacaatcacctctacaagcaaatctccaacagcacatctggaggatcttcaaatgacaacgcctacttcggctacagcaccccctgggggtattttgacttcaacagattccactgccacttctcaccacgtgactggcagcgactcatcaacaacaactggggattccggcctaagcgactcaacttcaagctcttcaacattcaggtcaaagaggttacggacaacaatggagtcaagaccatcgccaataaccttaccagcacggtccaggtcttcacggactcagactatcagctcccgtacgtgctcgggtcggctcacgagggctgcctcccgccgttcccagcggacgttttcatgattcctcagtacgggtatctgacgcttaatgatggaagccaggccgtgggtcgttcgtccttttactgcctggaatatttcccgtcgcaaatgctaagaacgggtaacaacttccagttcagctacgagtttgagaacgtacctttccatagcagctacgctcacagccaaagcctggaccgactaatgaatccactcatcgaccaatacttgtactatctctcaaagactattaacggttctggacagaatcaacaaacgctaaaattcagtgtggccggacccagcaacatggctgtccagggaagaaactacatacctggacccagctaccgacaacaacgtgtctcaaccactgtgactcaaaacaacaacagcgaatttgcttggcctggagcttcttcttgggctctcaatggacgtaatagcttgatgaatcctggacctgctatggccagccacaaagaaggagaggaccgtttctttcctttgtctggatctttaatttttggcaaacaaggaactggaagagacaacgtggatgcggacaaagtcatgataaccaacgaagaagaaattaaaactactaacccggtagcaacggagtcctatggacaagtggccacaaaccaccagagtgcgcaggcgtattcgacggatgagaggaagcaggcgcagaccggctgggttcaaaaccaaggaatacttccgggtatggtttggcaggacagagatgtgtacctgcaaggacccatttgggccaaaattcctcacacggacggcaactttcacccttctccgctgatgggagggtttggaatgaagcacccgcctcctcagatcctcatcaaaaacacacctgtacctgccgatcctccaacggccttcaacaaggacaagctgaactctttcatcacccagtattctactggccaagtcagcgtggagatcgagtgggagctgcagaaggaaaacagcaagcggtggaacccggagatccagtacacttccaactattacaagtctaataatgttgaatttgctgttaatactgaaggtgtatatagtgaaccccgccccattggcaccagatacctgactcgtaatctgtaa

SEQ ID NO: 3635 - DNA, 2232 bp, synthetic construct
  source 1..2232: mol_type = other DNA
atggctgccgatggttatcttccagattggctcgaggacaaccttagtgaaggaattcgcgagtggtgggctttgaaacctggagcccctcaacccaaggcaaatcaacaacatcaagacaacgctcgaggtcttgtgcttccgggttacaaataccttggacccggcaacggactcgacaagggggagccggtcaacgcagcagacgcggcggccctcgagcacgacaaggcctacgaccagcagctcaaggccggagacaacccgtacctcaagtacaaccacgccgacgccgagttccaggagcggctcaaagaagatacgtcttttgggggcaacctcgggcgagcagtcttccaggccaaaaagaggcttcttgaacctcttggtctggttgaggaagcggctaagacggctcctggaaagaagaggcctgtagagcagtctcctcaggaaccggactcctccgcgggtattggcaaatcgggtgcacagcccgctaaaaagagactcaatttcggtcagactggcgacacagagtcagtcccagaccctcaaccaatcggagaacctcccgcagccccctcaggtgtgggatctcttacaatggcttcaggtggtggcgcaccagtggcagacaataacgaaggtgccgatggagtgggtagttcctcgggaaattggcattgcgattcccaatggctgggggacagagtcatcaccaccagcacccgaacctgggccctgcccacctacaacaatcacctctacaagcaaatctccaacagcacatctggaggatcttcaaatgacaacgcctacttcggctacagcaccccctgggggtattttgacttcaacagattccactgccacttctcaccacgtgactggcagcgactcatcaacaacaactggggattccggcctaagcgactcaacttcaagctcttcaacattcaggtcaaagaggttacggacaacaatggagtcaagaccatcgccaataaccttaccagcacggtccaggtcttcacggactcagactatcagctcccgtacgtgctcgggtcggctcacgagggctgcctcccgccgttcccagcggacgttttcatgattcctcagtacgggtatctgacgcttaatgatggaagccaggccgtgggtcgttcgtccttttactgcctggaatatttcccgtcgcaaatgctaagaacgggtaacaacttccagttcagctacgagtttgagaacgtacctttccatagcagctacgctcacagccaaagcctggaccgactaatgaatccactcatcgaccaatacttgtactatctctcaaagactattaacggttctggacagaatcaacaaacgctaaaattcagtgtggccggacccagcaacatggctgtccagggaagaaactacatacctggacccagctaccgacaacaacgtgtctcaaccactgtgactcaaaacaacaacagcgaatttgcttggcctggagcttcttcttgggctctcaatggacgtaatagcttgatgaatcctggacctgctatggccagccacaaagaaggagaggaccgtttctttcctttgtctggatctttaatttttggcaaacaaggaactggaagagacaacgtggatgcggacaaagtcatgataaccaacgaagaagaaattaaaactactaacccggtagcaacggagtcctatggacaagtggccacaaaccaccagagtgcacaggcttatgtttcgtctgttaagatgcaggcgcagaccggctgggttcaaaaccaaggaatacttccgggtatggtttggcaggacagagatgtgtacctgcaaggacccatttgggccaaaattcctcacacggacggcaactttcacccttctccgctgatgggagggtttggaatgaagcacccgcctcctcagatcctcatcaaaaacacacctgtacctgccgatcctccaacggccttcaacaaggacaagctgaactctttcatcacccagtattctactggccaagtcagcgtggagatcgagtgggagctgcagaaggaaaacagcaagcggtggaacccggagatccagtacacttccaactattacaagtctaataatgttgaatttgctgttaatactgaaggtgtatatagtgaaccccgccccattggcaccagatacctgactcgtaatctgtaa

SEQ ID NO: 3636 - protein, 743 aa, synthetic construct
MAADGYLPDWLEDNLSEGIREWWALKPGAPQPKANQQHQDNARGLVLPGYKYLGPGNGLDKGEPVNAADAAALEHDKAYDQQLKAGDNPYLKYNHADAEFQERLKEDTSFGGNLGRAVFQAKKRLLEPLGLVEEAAKTAPGKKRPVEQSPQEPDSSAGIGKSGAQPAKKRLNFGQTGDTESVPDPQPIGEPPAAPSGVGSLTMASGGGAPVADNNEGADGVGSSSGNWHCDSQWLGDRVITTSTRTWALPTYNNHLYKQISNSTSGGSSNDNAYFGYSTPWGYFDFNRFHCHFSPRDWQRLINNNWGFRPKRLNFKLFNIQVKEVTDNNGVKTIANNLTSTVQVFTDSDYQLPYVLGSAHEGCLPPFPADVFMIPQYGYLTLNDGSQAVGRSSFYCLEYFPSQMLRTGNNFQFSYEFENVPFHSSYAHSQSLDRLMNPLIDQYLYYLSKTINGSGQNQQTLKFSVAGPSNMAVQGRNYIPGPSYRQQRVSTTVTQNNNSEFAWPGASSWALNGRNSLMNPGPAMASHKEGEDRFFPLSGSLIFGKQGTGRDNVDADKVMITNEEEIKTTNPVATESYGQVATNHQSPLNGAVHLYAQAQTGWVQNQGILPGMVWQDRDVYLQGPIWAKIPHTDGNFHPSPLMGGFGMKHPPPQILIKNTPVPADPPTAFNKDKLNSFITQYSTGQVSVEIEWELQKENSKRWNPEIQYTSNYYKSNNVEFAVNTEGVYSEPRPIGTRYLTRNL

SEQ ID NO: 3637 - protein, 743 aa, synthetic construct
MAADGYLPDWLEDNLSEGIREWWALKPGAPQPKANQQHQDNARGLVLPGYKYLGPGNGLDKGEPVNAADAAALEHDKAYDQQLKAGDNPYLKYNHADAEFQERLKEDTSFGGNLGRAVFQAKKRLLEPLGLVEEAAKTAPGKKRPVEQSPQEPDSSAGIGKSGAQPAKKRLNFGQTGDTESVPDPQPIGEPPAAPSGVGSLTMASGGGAPVADNNEGADGVGSSSGNWHCDSQWLGDRVITTSTRTWALPTYNNHLYKQISNSTSGGSSNDNAYFGYSTPWGYFDFNRFHCHFSPRDWQRLINNNWGFRPKRLNFKLFNIQVKEVTDNNGVKTIANNLTSTVQVFTDSDYQLPYVLGSAHEGCLPPFPADVFMIPQYGYLTLNDGSQAVGRSSFYCLEYFPSQMLRTGNNFQFSYEFENVPFHSSYAHSQSLDRLMNPLIDQYLYYLSKTINGSGQNQQTLKFSVAGPSNMAVQGRNYIPGPSYRQQRVSTTVTQNNNSEFAWPGASSWALNGRNSLMNPGPAMASHKEGEDRFFPLSGSLIFGKQGTGRDNVDADKVMITNEEEIKTTNPVATESYGQVATNHQSAQARDSPKGWQAQTGWVQNQGILPGMVWQDRDVYLQGPIWAKIPHTDGNFHPSPLMGGFGMKHPPPQILIKNTPVPADPPTAFNKDKLNSFITQYSTGQVSVEIEWELQKENSKRWNPEIQYTSNYYKSNNVEFAVNTEGVYSEPRPIGTRYLTRNL

SEQ ID NO: 3638 - protein, 743 aa, synthetic construct
MAADGYLPDWLEDNLSEGIREWWALKPGAPQPKANQQHQDNARGLVLPGYKYLGPGNGLDKGEPVNAADAAALEHDKAYDQQLKAGDNPYLKYNHADAEFQERLKEDTSFGGNLGRAVFQAKKRLLEPLGLVEEAAKTAPGKKRPVEQSPQEPDSSAGIGKSGAQPAKKRLNFGQTGDTESVPDPQPIGEPPAAPSGVGSLTMASGGGAPVADNNEGADGVGSSSGNWHCDSQWLGDRVITTSTRTWALPTYNNHLYKQISNSTSGGSSNDNAYFGYSTPWGYFDFNRFHCHFSPRDWQRLINNNWGFRPKRLNFKLFNIQVKEVTDNNGVKTIANNLTSTVQVFTDSDYQLPYVLGSAHEGCLPPFPADVFMIPQYGYLTLNDGSQAVGRSSFYCLEYFPSQMLRTGNNFQFSYEFENVPFHSSYAHSQSLDRLMNPLIDQYLYYLSKTINGSGQNQQTLKFSVAGPSNMAVQGRNYIPGPSYRQQRVSTTVTQNNNSEFAWPGASSWALNGRNSLMNPGPAMASHKEGEDRFFPLSGSLIFGKQGTGRDNVDADKVMITNEEEIKTTNPVATESYGQVATNHQSAQAYSTDVRMQAQTGWVQNQGILPGMVWQDRDVYLQGPIWAKIPHTDGNFHPSPLMGGFGMKHPPPQILIKNTPVPADPPTAFNKDKLNSFITQYSTGQVSVEIEWELQKENSKRWNPEIQYTSNYYKSNNVEFAVNTEGVYSEPRPIGTRYLTRNL

SEQ ID NO: 3639 - protein, 743 aa, synthetic construct
MAADGYLPDWLEDNLSEGIREWWALKPGAPQPKANQQHQDNARGLVLPGYKYLGPGNGLDKGEPVNAADAAALEHDKAYDQQLKAGDNPYLKYNHADAEFQERLKEDTSFGGNLGRAVFQAKKRLLEPLGLVEEAAKTAPGKKRPVEQSPQEPDSSAGIGKSGAQPAKKRLNFGQTGDTESVPDPQPIGEPPAAPSGVGSLTMASGGGAPVADNNEGADGVGSSSGNWHCDSQWLGDRVITTSTRTWALPTYNNHLYKQISNSTSGGSSNDNAYFGYSTPWGYFDFNRFHCHFSPRDWQRLINNNWGFRPKRLNFKLFNIQVKEVTDNNGVKTIANNLTSTVQVFTDSDYQLPYVLGSAHEGCLPPFPADVFMIPQYGYLTLNDGSQAVGRSSFYCLEYFPSQMLRTGNNFQFSYEFENVPFHSSYAHSQSLDRLMNPLIDQYLYYLSKTINGSGQNQQTLKFSVAGPSNMAVQGRNYIPGPSYRQQRVSTTVTQNNNSEFAWPGASSWALNGRNSLMNPGPAMASHKEGEDRFFPLSGSLIFGKQGTGRDNVDADKVMITNEEEIKTTNPVATESYGQVATNHQSAQIVMNSLKAQAQTGWVQNQGILPGMVWQDRDVYLQGPIWAKIPHTDGNFHPSPLMGGFGMKHPPPQILIKNTPVPADPPTAFNKDKLNSFITQYSTGQVSVEIEWELQKENSKRWNPEIQYTSNYYKSNNVEFAVNTEGVYSEPRPIGTRYLTRNL

SEQ ID NO: 3640 - protein, 743 aa, synthetic construct
MAADGYLPDWLEDNLSEGIREWWALKPGAPQPKANQQHQDNARGLVLPGYKYLGPGNGLDKGEPVNAADAAALEHDKAYDQQLKAGDNPYLKYNHADAEFQERLKEDTSFGGNLGRAVFQAKKRLLEPLGLVEEAAKTAPGKKRPVEQSPQEPDSSAGIGKSGAQPAKKRLNFGQTGDTESVPDPQPIGEPPAAPSGVGSLTMASGGGAPVADNNEGADGVGSSSGNWHCDSQWLGDRVITTSTRTWALPTYNNHLYKQISNSTSGGSSNDNAYFGYSTPWGYFDFNRFHCHFSPRDWQRLINNNWGFRPKRLNFKLFNIQVKEVTDNNGVKTIANNLTSTVQVFTDSDYQLPYVLGSAHEGCLPPFPADVFMIPQYGYLTLNDGSQAVGRSSFYCLEYFPSQMLRTGNNFQFSYEFENVPFHSSYAHSQSLDRLMNPLIDQYLYYLSKTINGSGQNQQTLKFSVAGPSNMAVQGRNYIPGPSYRQQRVSTTVTQNNNSEFAWPGASSWALNGRNSLMNPGPAMASHKEGEDRFFPLSGSLIFGKQGTGRDNVDADKVMITNEEEIKTTNPVATESYGQVATNHQSAQARESPRGLQAQTGWVQNQGILPGMVWQDRDVYLQGPIWAKIPHTDGNFHPSPLMGGFGMKHPPPQILIKNTPVPADPPTAFNKDKLNSFITQYSTGQVSVEIEWELQKENSKRWNPEIQYTSNYYKSNNVEFAVNTEGVYSEPRPIGTRYLTRNL

SEQ ID NO: 3641 - protein, 743 aa, synthetic construct
MAADGYLPDWLEDNLSEGIREWWALKPGAPQPKANQQHQDNARGLVLPGYKYLGPGNGLDKGEPVNAADAAALEHDKAYDQQLKAGDNPYLKYNHADAEFQERLKEDTSFGGNLGRAVFQAKKRLLEPLGLVEEAAKTAPGKKRPVEQSPQEPDSSAGIGKSGAQPAKKRLNFGQTGDTESVPDPQPIGEPPAAPSGVGSLTMASGGGAPVADNNEGADGVGSSSGNWHCDSQWLGDRVITTSTRTWALPTYNNHLYKQISNSTSGGSSNDNAYFGYSTPWGYFDFNRFHCHFSPRDWQRLINNNWGFRPKRLNFKLFNIQVKEVTDNNGVKTIANNLTSTVQVFTDSDYQLPYVLGSAHEGCLPPFPADVFMIPQYGYLTLNDGSQAVGRSSFYCLEYFPSQMLRTGNNFQFSYEFENVPFHSSYAHSQSLDRLMNPLIDQYLYYLSKTINGSGQNQQTLKFSVAGPSNMAVQGRNYIPGPSYRQQRVSTTVTQNNNSEFAWPGASSWALNGRNSLMNPGPAMASHKEGEDRFFPLSGSLIFGKQGTGRDNVDADKVMITNEEEIKTTNPVATESYGQVATNHQSAQASFNDTRAQAQTGWVQNQGILPGMVWQDRDVYLQGPIWAKIPHTDGNFHPSPLMGGFGMKHPPPQILIKNTPVPADPPTAFNKDKLNSFITQYSTGQVSVEIEWELQKENSKRWNPEIQYTSNYYKSNNVEFAVNTEGVYSEPRPIGTRYLTRNL

SEQ ID NO: 3642 - protein, 743 aa, synthetic construct
MAADGYLPDWLEDNLSEGIREWWALKPGAPQPKANQQHQDNARGLVLPGYKYLGPGNGLDKGEPVNAADAAALEHDKAYDQQLKAGDNPYLKYNHADAEFQERLKEDTSFGGNLGRAVFQAKKRLLEPLGLVEEAAKTAPGKKRPVEQSPQEPDSSAGIGKSGAQPAKKRLNFGQTGDTESVPDPQPIGEPPAAPSGVGSLTMASGGGAPVADNNEGADGVGSSSGNWHCDSQWLGDRVITTSTRTWALPTYNNHLYKQISNSTSGGSSNDNAYFGYSTPWGYFDFNRFHCHFSPRDWQRLINNNWGFRPKRLNFKLFNIQVKEVTDNNGVKTIANNLTSTVQVFTDSDYQLPYVLGSAHEGCLPPFPADVFMIPQYGYLTLNDGSQAVGRSSFYCLEYFPSQMLRTGNNFQFSYEFENVPFHSSYAHSQSLDRLMNPLIDQYLYYLSKTINGSGQNQQTLKFSVAGPSNMAVQGRNYIPGPSYRQQRVSTTVTQNNNSEFAWPGASSWALNGRNSLMNPGPAMASHKEGEDRFFPLSGSLIFGKQGTGRDNVDADKVMITNEEEIKTTNPVATESYGQVATNHQSGGTLAVVSLAQAQTGWVQNQGILPGMVWQDRDVYLQGPIWAKIPHTDGNFHPSPLMGGFGMKHPPPQILIKNTPVPADPPTAFNKDKLNSFITQYSTGQVSVEIEWELQKENSKRWNPEIQYTSNYYKSNNVEFAVNTEGVYSEPRPIGTRYLTRNL

SEQ ID NO: 3643 - protein, 743 aa, synthetic construct
MAADGYLPDWLEDNLSEGIREWWALKPGAPQPKANQQHQDNARGLVLPGYKYLGPGNGLDKGEPVNAADAAALEHDKAYDQQLKAGDNPYLKYNHADAEFQERLKEDTSFGGNLGRAVFQAKKRLLEPLGLVEEAAKTAPGKKRPVEQSPQEPDSSAGIGKSGAQPAKKRLNFGQTGDTESVPDPQPIGEPPAAPSGVGSLTMASGGGAPVADNNEGADGVGSSSGNWHCDSQWLGDRVITTSTRTWALPTYNNHLYKQISNSTSGGSSNDNAYFGYSTPWGYFDFNRFHCHFSPRDWQRLINNNWGFRPKRLNFKLFNIQVKEVTDNNGVKTIANNLTSTVQVFTDSDYQLPYVLGSAHEGCLPPFPADVFMIPQYGYLTLNDGSQAVGRSSFYCLEYFPSQMLRTGNNFQFSYEFENVPFHSSYAHSQSLDRLMNPLIDQYLYYLSKTINGSGQNQQTLKFSVAGPSNMAVQGRNYIPGPSYRQQRVSTTVTQNNNSEFAWPGASSWALNGRNSLMNPGPAMASHKEGEDRFFPLSGSLIFGKQGTGRDNVDADKVMITNEEEIKTTNPVATESYGQVATNHQSAQAYGLPKGPQAQTGWVQNQGILPGMVWQDRDVYLQGPIWAKIPHTDGNFHPSPLMGGFGMKHPPPQILIKNTPVPADPPTAFNKDKLNSFITQYSTGQVSVEIEWELQKENSKRWNPEIQYTSNYYKSNNVEFAVNTEGVYSEPRPIGTRYLTRNL

SEQ ID NO: 3644 - protein, 743 aa, synthetic construct
MAADGYLPDWLEDNLSEGIREWWALKPGAPQPKANQQHQDNARGLVLPGYKYLGPGNGLDKGEPVNAADAAALEHDKAYDQQLKAGDNPYLKYNHADAEFQERLKEDTSFGGNLGRAVFQAKKRLLEPLGLVEEAAKTAPGKKRPVEQSPQEPDSSAGIGKSGAQPAKKRLNFGQTGDTESVPDPQPIGEPPAAPSGVGSLTMASGGGAPVADNNEGADGVGSSSGNWHCDSQWLGDRVITTSTRTWALPTYNNHLYKQISNSTSGGSSNDNAYFGYSTPWGYFDFNRFHCHFSPRDWQRLINNNWGFRPKRLNFKLFNIQVKEVTDNNGVKTIANNLTSTVQVFTDSDYQLPYVLGSAHEGCLPPFPADVFMIPQYGYLTLNDGSQAVGRSSFYCLEYFPSQMLRTGNNFQFSYEFENVPFHSSYAHSQSLDRLMNPLIDQYLYYLSKTINGSGQNQQTLKFSVAGPSNMAVQGRNYIPGPSYRQQRVSTTVTQNNNSEFAWPGASSWALNGRNSLMNPGPAMASHKEGEDRFFPLSGSLIFGKQGTGRDNVDADKVMITNEEEIKTTNPVATESYGQVATNHQSAQASTGTLRLQAQTGWVQNQGILPGMVWQDRDVYLQGPIWAKIPHTDGNFHPSPLMGGFGMKHPPPQILIKNTPVPADPPTAFNKDKLNSFITQYSTGQVSVEIEWELQKENSKRWNPEIQYTSNYYKSNNVEFAVNTEGVYSEPRPIGTRYLTRNL

SEQ ID NO: 3645 - protein, 743 aa, synthetic construct
MAADGYLPDWLEDNLSEGIREWWALKPGAPQPKANQQHQDNARGLVLPGYKYLGPGNGLDKGEPVNAADAAALEHDKAYDQQLKAGDNPYLKYNHADAEFQERLKEDTSFGGNLGRAVFQAKKRLLEPLGLVEEAAKTAPGKKRPVEQSPQEPDSSAGIGKSGAQPAKKRLNFGQTGDTESVPDPQPIGEPPAAPSGVGSLTMASGGGAPVADNNEGADGVGSSSGNWHCDSQWLGDRVITTSTRTWALPTYNNHLYKQISNSTSGGSSNDNAYFGYSTPWGYFDFNRFHCHFSPRDWQRLINNNWGFRPKRLNFKLFNIQVKEVTDNNGVKTIANNLTSTVQVFTDSDYQLPYVLGSAHEGCLPPFPADVFMIPQYGYLTLNDGSQAVGRSSFYCLEYFPSQMLRTGNNFQFSYEFENVPFHSSYAHSQSLDRLMNPLIDQYLYYLSKTINGSGQNQQTLKFSVAGPSNMAVQGRNYIPGPSYRQQRVSTTVTQNNNSEFAWPGASSWALNGRNSLMNPGPAMASHKEGEDRFFPLSGSLIFGKQGTGRDNVDADKVMITNEEEIKTTNPVATESYGQVATNHQSAQAYSTDERMQAQTGWVQNQGILPGMVWQDRDVYLQGPIWAKIPHTDGNFHPSPLMGGFGMKHPPPQILIKNTPVPADPPTAFNKDKLNSFITQYSTGQVSVEIEWELQKENSKRWNPEIQYTSNYYKSNNVEFAVNTEGVYSEPRPIGTRYLTRNL

SEQ ID NO: 3646 - protein, 743 aa, synthetic construct
MAADGYLPDWLEDNLSEGIREWWALKPGAPQPKANQQHQDNARGLVLPGYKYLGPGNGLDKGEPVNAADAAALEHDKAYDQQLKAGDNPYLKYNHADAEFQERLKEDTSFGGNLGRAVFQAKKRLLEPLGLVEEAAKTAPGKKRPVEQSPQEPDSSAGIGKSGAQPAKKRLNFGQTGDTESVPDPQPIGEPPAAPSGVGSLTMASGGGAPVADNNEGADGVGSSSGNWHCDSQWLGDRVITTSTRTWALPTYNNHLYKQISNSTSGGSSNDNAYFGYSTPWGYFDFNRFHCHFSPRDWQRLINNNWGFRPKRLNFKLFNIQVKEVTDNNGVKTIANNLTSTVQVFTDSDYQLPYVLGSAHEGCLPPFPADVFMIPQYGYLTLNDGSQAVGRSSFYCLEYFPSQMLRTGNNFQFSYEFENVPFHSSYAHSQSLDRLMNPLIDQYLYYLSKTINGSGQNQQTLKFSVAGPSNMAVQGRNYIPGPSYRQQRVSTTVTQNNNSEFAWPGASSWALNGRNSLMNPGPAMASHKEGEDRFFPLSGSLIFGKQGTGRDNVDADKVMITNEEEIKTTNPVATESYGQVATNHQSAQAYSTDERKQAQTGWVQNQGILPGMVWQDRDVYLQGPIWAKIPHTDGNFHPSPLMGGFGMKHPPPQILIKNTPVPADPPTAFNKDKLNSFITQYSTGQVSVEIEWELQKENSKRWNPEIQYTSNYYKSNNVEFAVNTEGVYSEPRPIGTRYLTRNL

SEQ ID NO: 3647 - protein, 743 aa, synthetic construct
MAADGYLPDWLEDNLSEGIREWWALKPGAPQPKANQQHQDNARGLVLPGYKYLGPGNGLDKGEPVNAADAAALEHDKAYDQQLKAGDNPYLKYNHADAEFQERLKEDTSFGGNLGRAVFQAKKRLLEPLGLVEEAAKTAPGKKRPVEQSPQEPDSSAGIGKSGAQPAKKRLNFGQTGDTESVPDPQPIGEPPAAPSGVGSLTMASGGGAPVADNNEGADGVGSSSGNWHCDSQWLGDRVITTSTRTWALPTYNNHLYKQISNSTSGGSSNDNAYFGYSTPWGYFDFNRFHCHFSPRDWQRLINNNWGFRPKRLNFKLFNIQVKEVTDNNGVKTIANNLTSTVQVFTDSDYQLPYVLGSAHEGCLPPFPADVFMIPQYGYLTLNDGSQAVGRSSFYCLEYFPSQMLRTGNNFQFSYEFENVPFHSSYAHSQSLDRLMNPLIDQYLYYLSKTINGSGQNQQTLKFSVAGPSNMAVQGRNYIPGPSYRQQRVSTTVTQNNNSEFAWPGASSWALNGRNSLMNPGPAMASHKEGEDRFFPLSGSLIFGKQGTGRDNVDADKVMITNEEEIKTTNPVATESYGQVATNHQSAQAYVSSVKMQAQTGWVQNQGILPGMVWQDRDVYLQGPIWAKIPHTDGNFHPSPLMGGFGMKHPPPQILIKNTPVPADPPTAFNKDKLNSFITQYSTGQVSVEIEWELQKENSKRWNPEIQYTSNYYKSNNVEFAVNTEGVYSEPRPIGTRYLTRNL

SEQ ID NO: 3648 - protein, 9 aa, synthetic construct
PLNGAVHLY

SEQ ID NO: 3649 - protein, 7 aa, synthetic construct
RDSPKGW

SEQ ID NO: 3650 - protein, 7 aa, synthetic construct
YSTDVRM

SEQ ID NO: 3651 - protein, 7 aa, synthetic construct
IVMNSLK

SEQ ID NO: 3652 - protein, 7 aa, synthetic construct
RESPRGL

SEQ ID NO: 3653 - protein, 7 aa, synthetic construct
SFNDTRA

SEQ ID NO: 3654 - protein, 9 aa, synthetic construct
GGTLAVVSL

SEQ ID NO: 3655 - protein, 7 aa, synthetic construct
YGLPKGP

SEQ ID NO: 3656 - protein, 7 aa, synthetic construct
STGTLRL

SEQ ID NO: 3657 - protein, 7 aa, synthetic construct
YSTDERM

SEQ ID NO: 3658 - protein, 7 aa, synthetic construct
YSTDERK

SEQ ID NO: 3659 - protein, 7 aa, synthetic construct
YVSSVKM

SEQ ID NO: 3660 - DNA, 27 bp, synthetic construct
  source 1..27: mol_type = other DNA
ccgcttaatggtgccgtccatctttat

SEQ ID NO: 3661 - DNA, 23 bp, synthetic construct
  source 1..23: mol_type = other DNA
cgtgattctccgaagggttggca

SEQ ID NO: 3662 - DNA, 23 bp, synthetic construct
  source 1..23: mol_type = other DNA
tattctacggatgtgaggatgca

SEQ ID NO: 3663 - DNA, 23 bp, synthetic construct
  source 1..23: mol_type = other DNA
attgttatgaattcgttgaaggc

SEQ ID NO: 3664 - DNA, 23 bp, synthetic construct
  source 1..23: mol_type = other DNA
cgggagagtcctcgtgggctgca

SEQ ID NO: 3665 - DNA, 23 bp, synthetic construct
  source 1..23: mol_type = other DNA
agttttaatgatactagggctca

SEQ ID NO: 3666 - DNA, 27 bp, synthetic construct
  source 1..27: mol_type = other DNA
ggtggtacgttggccgtcgtgtcgctt

SEQ ID NO: 3667 - DNA, 21 bp, synthetic construct
  source 1..21: mol_type = other DNA
tatgggttgccgaagggtcct

SEQ ID NO: 3668 - DNA, 21 bp, synthetic construct
  source 1..21: mol_type = other DNA
tcgactgggacgcttcggctt

SEQ ID NO: 3669 - DNA, 21 bp, synthetic construct
  source 1..21: mol_type = other DNA
tattcgacggatgagaggatg

SEQ ID NO: 3670 - DNA, 21 bp, synthetic construct
  source 1..21: mol_type = other DNA
tattcgacggatgagaggaag

SEQ ID NO: 3671 - DNA, 21 bp, synthetic construct
  source 1..21: mol_type = other DNA
tatgtttcgtctgttaagatg

SEQ ID NO: 3672-3677 - skipped (6 entries)

SEQ ID NO: 3678 - protein, 4 aa, synthetic construct
PLNG

SEQ ID NO: 3679 - protein, 5 aa, synthetic construct
PLNGA

SEQ ID NO: 3680 - protein, 6 aa, synthetic construct
PLNGAV

SEQ ID NO: 3681 - protein, 7 aa, synthetic construct
PLNGAVH

SEQ ID NO: 3682 - protein, 8 aa, synthetic construct
PLNGAVHL

SEQ ID NO: 3683 - protein, 4 aa, synthetic construct
NGAV

SEQ ID NO: 3684 - protein, 4 aa, synthetic construct
GAVH

SEQ ID NO: 3685 - protein, 5 aa, synthetic construct
NGAVH

SEQ ID NO: 3686 - protein, 5 aa, synthetic construct
GAVHL

SEQ ID NO: 3687 - protein, 5 aa, synthetic construct
AVHLY

SEQ ID NO: 3688 - protein, 6 aa, synthetic construct
NGAVHL

SEQ ID NO: 3689 - protein, 7 aa, synthetic construct
NGAVHLY

SEQ ID NO: 3690 - protein, 4 aa, synthetic construct
YSTD

SEQ ID NO: 3691 - protein, 5 aa, synthetic construct
YSTDE

SEQ ID NO: 3692 - protein, 6 aa, synthetic construct
YSTDER

SEQ ID NO: 3693 - protein, 4 aa, synthetic construct
IVMN

SEQ ID NO: 3694 - protein, 5 aa, synthetic construct
IVMNS

SEQ ID NO: 3695 - protein, 6 aa, synthetic construct
IVMNSL

SEQ ID NO: 3696-3699 - skipped (4 entries)

SEQ ID NO: 3700 - protein, 5 aa, synthetic construct
YSTDV

SEQ ID NO: 3701 - protein, 6 aa, synthetic construct
YSTDVR

SEQ ID NO: 3702-4678 - skipped (977 entries)

SEQ ID NO: 4679 - DNA, 22 bp, synthetic construct
  source 1..22: mol_type = other DNA
atacatacttctttacattcca

SEQ ID NO: 4680 - protein, 4 aa, synthetic construct
VHLY

SEQ ID NO: 4681 - protein, 4 aa, synthetic construct
VHIY

SEQ ID NO: 4682 - protein, 4 aa, synthetic construct
VHVY

SEQ ID NO: 4683 - protein, 4 aa, synthetic construct
VHHY

SEQ ID NO: 4684 - protein, 5 aa, synthetic construct
SLNGA

SEQ ID NO: 4685 - protein, 5 aa, synthetic construct
QLNGA

SEQ ID NO: 4686 - protein, 5 aa, synthetic construct
ALNGA

SEQ ID NO: 4687 - protein, 5 aa, synthetic construct
PLNGS

SEQ ID NO: 4688 - protein, 5 aa, synthetic construct
PVNGA

SEQ ID NO: 4689 - protein, 5 aa, synthetic construct
PLNGG

SEQ ID NO: 4690 - protein, 5 aa, synthetic construct
PLNGT

SEQ ID NO: 4691 - protein, 5 aa, synthetic construct
PLDGA

SEQ ID NO: 4692 - protein, 5 aa, synthetic construct
QLNGS

SEQ ID NO: 4693 - protein, 5 aa, synthetic construct
PLNGN

SEQ ID NO: 4694 - protein, 5 aa, synthetic construct
SLDGA

SEQ ID NO: 4695 - protein, 5 aa, synthetic construct
HLNGA

SEQ ID NO: 4696 - protein, 5 aa, synthetic construct
ALNGT

SEQ ID NO: 4697 - protein, 5 aa, synthetic construct
PINGA

SEQ ID NO: 4698 - protein, 5 aa, synthetic construct
ALDGA

SEQ ID NO: 4699 - protein, 5 aa, synthetic construct
PLNCA

SEQ ID NO: 4700 - protein, 5 aa, synthetic construct
PLNGQ

SEQ ID NO: 4701 - protein, 5 aa, synthetic construct
PLDSA

SEQ ID NO: 4702 - protein, 5 aa, synthetic construct
RLDGA

SEQ ID NO: 4703 - protein, 5 aa, synthetic construct
QLNGN

SEQ ID NO: 4704 - protein, 5 aa, synthetic construct
PLNGY

SEQ ID NO: 4705 - protein, 5 aa, synthetic construct
PLDSS

SEQ ID NO: 4706 - protein, 5 aa, synthetic construct
PLNGC

SEQ ID NO: 4707 - protein, 5 aa, synthetic construct
PLYGA

SEQ ID NO: 4708 - protein, 5 aa, synthetic construct
TLNGA

SEQ ID NO: 4709 - protein, 5 aa, synthetic construct
PVDGA

SEQ ID NO: 4710 - protein, 5 aa, synthetic construct
PLKGA

SEQ ID NO: 4711 - protein, 5 aa, synthetic construct
PLNGD

SEQ ID NO: 4712 - protein, 5 aa, synthetic construct
KLDGA

SEQ ID NO: 4713 - protein, 5 aa, synthetic construct
PHNGA

SEQ ID NO: 4714 - protein, 5 aa, synthetic construct
PLNGV

SEQ ID NO: 4715 - protein, 5 aa, synthetic construct
PLNAA

SEQ ID NO: 4716 - protein, 5 aa, synthetic construct
QLNGY

SEQ ID NO: 4717 - protein, 5 aa, synthetic construct
PLDGS

SEQ ID NO: 4718 - protein, 5 aa, synthetic construct
LLNGA

SEQ ID NO: 4719 - protein, 5 aa, synthetic construct
PLNRA

SEQ ID NO: 4720 - protein, 5 aa, synthetic construct
PLIGA

SEQ ID NO: 4721 - protein, 5 aa, synthetic construct
PRNGA

SEQ ID NO: 4722 - protein, 5 aa, synthetic construct
ALNGS

SEQ ID NO: 4723 - protein, 4 aa, synthetic construct
VPLY

SEQ ID NO: 4724 - protein, 4 aa, synthetic construct
VNLY

SEQ ID NO: 4725 - protein, 4 aa, synthetic construct
VHRY

SEQ ID NO: 4726 - protein, 4 aa, synthetic construct
FHLY

SEQ ID NO: 4727 - protein, 4 aa, synthetic construct
LHLY

SEQ ID NO: 4728 - protein, 4 aa, synthetic construct
DHLY

SEQ ID NO: 4729 - protein, 4 aa, synthetic construct
VQLY

SEQ ID NO: 4730 - protein, 4 aa, synthetic construct
IHLY

SEQ ID NO: 4731 - protein, 4 aa, synthetic construct
VDLY

SEQ ID NO: 4732 - protein, 4 aa, synthetic construct
AHLY

SEQ ID NO: 4733 - protein, 4 aa, synthetic construct
VLLY

SEQ ID NO: 4734 - protein, 4 aa, synthetic construct
GHLY

SEQ ID NO: 4735 - protein, 4 aa, synthetic construct
VRLY

SEQ ID NO: 4736 - protein, 4 aa, synthetic construct
VYLY

SEQ ID NO: 4737 - protein, 4 aa, synthetic construct
AQAQ

SEQ ID NO: 4738 - protein, 4 aa, synthetic construct
SQAQ

SEQ ID NO: 4739 - protein, 4 aa, synthetic construct
AQPQ

SEQ ID NO: 4740 - protein, 4 aa, synthetic construct
AQSQ

SEQ ID NO: 4741 - protein, 4 aa, synthetic construct
AKAQ

SEQ ID NO: 4742 - protein, 4 aa, synthetic construct
AHAQ

SEQ ID NO: 4743 - protein, 4 aa, synthetic construct
AQAP

SEQ ID NO: 4744 - protein, 4 aa, synthetic construct
DQAQ

SEQ ID NO: 4745 - protein, 4 aa, synthetic construct
APAQ

SEQ ID NO: 4746 - protein, 4 aa, synthetic construct
AQAK

SEQ ID NO: 4747 - protein, 4 aa, synthetic construct
AQAH

SEQ ID NO: 4748 - protein, 4 aa, synthetic construct
AQEQ

SEQ ID NO: 4749 - protein, 4 aa, synthetic construct
ALAQ

SEQ ID NO: 4750 - protein, 4 aa, synthetic construct
ARAQ

SEQ ID NO: 4751 - protein, 4 aa, synthetic construct
TQAQ

SEQ ID NO: 4752-4753 - skipped (2 entries)

SEQ ID NO: 4754 - protein, 4 aa, synthetic construct
TLNG

SEQ ID NO: 4755 - skipped

SEQ ID NO: 4756 - protein, 4 aa, synthetic construct
SLNG

SEQ ID NO: 4757 - skipped

SEQ ID NO: 4758 - protein, 4 aa, synthetic construct
ALNG

SEQ ID NO: 4759-4761 - skipped (3 entries)

SEQ ID NO: 4762 - protein, 4 aa, synthetic construct
ALDG

SEQ ID NO: 4763 - protein, 4 aa, synthetic construct
PING

SEQ ID NO: 4764 - protein, 4 aa, synthetic construct
PLDG

SEQ ID NO: 4765 - protein, 4 aa, synthetic construct
PLDS

SEQ ID NO: 4766 - protein, 4 aa, synthetic construct
QLNG

SEQ ID NO: 4767 - protein, 4 aa, synthetic construct
SLDG

SEQ ID NO: 4768 - protein, 8 aa, synthetic construct
LDGAVHLY

SEQ ID NO: 4769 - protein, 8 aa, synthetic construct
LNGAVHLY

SEQ ID NO: 4770 - protein, 8 aa, synthetic construct
INGAVHLY

SEQ ID NO: 4771 - protein, 8 aa, synthetic construct
LDSAVHLY

SEQ ID NO: 4772 - protein, 8 aa, synthetic construct
LDSSVHLY

SEQ ID NO: 4773 - protein, 8 aa, synthetic construct
LNGGVHLY

SEQ ID NO: 4774 - protein, 8 aa, synthetic construct
LNGNVHLY

SEQ ID NO: 4775 - protein, 8 aa, synthetic construct
LNGSVHLY

SEQ ID NO: 4776 - protein, 8 aa, synthetic construct
LNGTVHLY

SEQ ID NO: 4777 - protein, 8 aa, synthetic construct
LNGAVHIY

SEQ ID NO: 4778 - protein, 8 aa, synthetic construct
LDGAVHVY

SEQ ID NO: 4779 - protein, 8 aa, synthetic construct
LNGAVHHY

SEQ ID NO: 4780 - protein, 9 aa, synthetic construct
ALDGAVHLY

SEQ ID NO: 4781 - protein, 9 aa, synthetic construct
ALNGAVHLY

SEQ ID NO: 4782 - protein, 9 aa, synthetic construct
PINGAVHLY

SEQ ID NO: 4783 - protein, 9 aa, synthetic construct
PLDGAVHLY

SEQ ID NO: 4784 - protein, 9 aa, synthetic construct
PLDSAVHLY

SEQ ID NO: 4785 - protein, 9 aa, synthetic construct
PLDSSVHLY

SEQ ID NO: 4786 - protein, 9 aa, synthetic construct
PLNGGVHLY

SEQ ID NO: 4787 - protein, 9 aa, synthetic construct
PLNGNVHLY

SEQ ID NO: 4788 - protein, 9 aa, synthetic construct
PLNGSVHLY

SEQ ID NO: 4789 - protein, 9 aa, synthetic construct
PLNGTVHLY

SEQ ID NO: 4790 - protein, 9 aa, synthetic construct
QLNGAVHLY

SEQ ID NO: 4791 - protein, 9 aa, synthetic construct
SLDGAVHLY

SEQ ID NO: 4792 - protein, 9 aa, synthetic construct
SLNGAVHLY

SEQ ID NO: 4793 - protein, 9 aa, synthetic construct
TLNGAVHLY

SEQ ID NO: 4794 - protein, 9 aa, synthetic construct
PLNGAVHIY

SEQ ID NO: 4795 - protein, 9 aa, synthetic construct
PLDGAVHVY

SEQ ID NO: 4796 - protein, 9 aa, synthetic construct
PLNGAVHHY

SEQ ID NO: 4797 - protein, 8 aa, synthetic construct
VHLYAQAQ

SEQ ID NO: 4798 - protein, 8 aa, synthetic construct
VHLYAQPQ

SEQ ID NO: 4799 - protein, 8 aa, synthetic construct
VHLYSQAQ

SEQ ID NO: 4800 - protein, 8 aa, synthetic construct
VHLYAKAQ

SEQ ID NO: 4801 - protein, 8 aa, synthetic construct
VHLYDQAQ

SEQ ID NO: 4802 - protein, 8 aa, synthetic construct
VHIYAQAQ

SEQ ID NO: 4803 - protein, 8 aa, synthetic construct
VHVYAQAQ

SEQ ID NO: 4804 - protein, 8 aa, synthetic construct
VHHYAQAQ

SEQ ID NO: 4805 - protein, 11 aa, synthetic construct
ALDGAVHLYAQ

SEQ ID NO: 4806 - protein, 11 aa, synthetic construct
ALNGAVHLYAQ

SEQ ID NO: 4807 - protein, 11 aa, synthetic construct
PINGAVHLYAQ

SEQ ID NO: 4808 - protein, 11 aa, synthetic construct
PLDGAVHLYAQ

SEQ ID NO: 4809 - protein, 11 aa, synthetic construct
PLDGAVHLYSQ

SEQ ID NO: 4810 - protein, 11 aa, synthetic construct
PLDSAVHLYAQ

SEQ ID NO: 4811 - protein, 11 aa, synthetic construct
PLDSSVHLYAQ

SEQ ID NO: 4812 - protein, 11 aa, synthetic construct
PLNGAVHLYAK

SEQ ID NO: 4813 - protein, 11 aa, synthetic construct
PLNGAVHLYAQ

SEQ ID NO: 4814 - protein, 11 aa, synthetic construct
PLNGAVHLYDQ

SEQ ID NO: 4815 - protein, 11 aa, synthetic construct
PLNGAVHLYSQ

SEQ ID NO: 4816 - protein, 11 aa, synthetic construct
PLNGGVHLYAQ

SEQ ID NO: 4817 - protein, 11 aa, synthetic construct
PLNGNVHLYAQ

SEQ ID NO: 4818 - protein, 11 aa, synthetic construct
PLNGSVHLYAQ

SEQ ID NO: 4819 - protein, 11 aa, synthetic construct
PLNGTVHLYAQ

SEQ ID NO: 4820 - protein, 11 aa, synthetic construct
QLNGAVHLYAQ

SEQ ID NO: 4821 - protein, 11 aa, synthetic construct
SLDGAVHLYAQ

SEQ ID NO: 4822 - protein, 11 aa, synthetic construct
SLNGAVHLYAQ

SEQ ID NO: 4823 - protein, 11 aa, synthetic construct
TLNGAVHLYAQ

SEQ ID NO: 4824 - protein, 11 aa, synthetic construct
PLNGAVHIYAQ

SEQ ID NO: 4825 - protein, 11 aa, synthetic construct
PLDGAVHVYAQ

SEQ ID NO: 4826 - protein, 11 aa, synthetic construct
PLNGAVHHYAQ

SEQ ID NO: 4827 - protein, 13 aa, synthetic construct
ALDGAVHLYAQAQ

SEQ ID NO: 4828 - protein, 13 aa, synthetic construct
ALNGAVHLYAQAQ

SEQ ID NO: 4829 - protein, 13 aa, synthetic construct
PINGAVHLYAQAQ

SEQ ID NO: 4830 - protein, 13 aa, synthetic construct
PLDGAVHLYAQAQ

SEQ ID NO: 4831 - protein, 13 aa, synthetic construct
PLDGAVHLYAQPQ

SEQ ID NO: 4832 - protein, 13 aa, synthetic construct
PLDGAVHLYSQAQ

SEQ ID NO: 4833 - protein, 13 aa, synthetic construct
PLDSAVHLYAQAQ

SEQ ID NO: 4834 - protein, 13 aa, synthetic construct
PLDSSVHLYAQAQ

SEQ ID NO: 4835 - protein, 13 aa, synthetic construct
PLNGAVHLYAKAQ

SEQ ID NO: 4836 - protein, 13 aa, synthetic construct
PLNGAVHLYAQAQ

SEQ ID NO: 4837 - protein, 13 aa, synthetic construct
PLNGAVHLYAQPQ

SEQ ID NO: 4838 - protein, 13 aa, synthetic construct
PLNGAVHLYDQAQ

SEQ ID NO: 4839 - protein, 13 aa, synthetic construct
PLNGAVHLYSQAQ

SEQ ID NO: 4840 - protein, 13 aa, synthetic construct
PLNGGVHLYAQAQ

SEQ ID NO: 4841 - protein, 13 aa, synthetic construct
PLNGNVHLYAQAQ

SEQ ID NO: 4842 - protein, 13 aa, synthetic construct
PLNGSVHLYAQAQ

SEQ ID NO: 4843 - protein, 13 aa, synthetic construct
PLNGTVHLYAQAQ

SEQ ID NO: 4844 - protein, 13 aa, synthetic construct
QLNGAVHLYAQAQ

SEQ ID NO: 4845 - protein, 13 aa, synthetic construct
SLDGAVHLYAQAQ

SEQ ID NO: 4846 - protein, 13 aa, synthetic construct
SLNGAVHLYAQAQ

SEQ ID NO: 4847 - protein, 13 aa, synthetic construct
TLNGAVHLYAQAQ

SEQ ID NO: 4848 - protein, 13 aa, synthetic construct
PLNGAVHIYAQAQ

SEQ ID NO: 4849 - protein, 13 aa, synthetic construct
PLDGAVHVYAQAQ

SEQ ID NO: 4850 - protein, 13 aa, synthetic construct
PLNGAVHHYAQAQ

SEQ ID NO: 4851 - protein, 6 aa, synthetic construct
TGWVQN

SEQ ID NO: 4852 - protein, 6 aa, synthetic construct
LAAVQN

SEQ ID NO: 4853 - protein, 6 aa, synthetic construct
LTPVQN

SEQ ID NO: 4854 - protein, 6 aa, synthetic construct
SAPVQN

SEQ ID NO: 4855 - protein, 6 aa, synthetic construct
SSPVQN

SEQ ID NO: 4856 - protein, 6 aa, synthetic construct
TGRVQN

SEQ ID NO: 4857 - protein, 6 aa, synthetic construct
TGWAQN

SEQ ID NO: 4858 - protein, 6 aa, synthetic construct
TGWVQS

SEQ ID NO: 4859 - protein, 6 aa, synthetic construct
TLAVQN

SEQ ID NO: 4860 - protein, 6 aa, synthetic construct
TTSVQN

SEQ ID NO: 4861 - protein, 6 aa, synthetic construct
TSPVQN

SEQ ID NO: 4862 - protein, 6 aa, synthetic construct
TALVQN

SEQ ID NO: 4863 - protein, 6 aa, synthetic construct
TAWVQN

SEQ ID NO: 4864 - protein, 6 aa, synthetic construct
TGGVQN

SEQ ID NO: 4865 - protein, 6 aa, synthetic construct
TGSVQN

SEQ ID NO: 4866 - protein, 6 aa, synthetic construct
TGWDQN

SEQ ID NO: 4867 - protein, 6 aa, synthetic construct
TVSVQN

SEQ ID NO: 4868 - protein, 6 aa, synthetic construct
VSPVQN

SEQ ID NO: 4869 - protein, 6 aa, synthetic construct
VSSVQN

SEQ ID NO: 4870 - protein, 6 aa, synthetic construct
AAPVQN

SEQ ID NO: 4871 - protein, 6 aa, synthetic construct
AGPVQN

SEQ ID NO: 4872 - protein, 6 aa, synthetic construct
ASPVQN

SEQ ID NO: 4873 - protein, 6 aa, synthetic construct
ATPVQN

SEQ ID NO: 4874 - protein, 6 aa, synthetic construct
CSPVQN

SEQ ID NO: 4875 - protein, 6 aa, synthetic construct
CTPVQN

SEQ ID NO: 4876 - protein, 6 aa, synthetic construct
IAAVQN

SEQ ID NO: 4877 - protein, 6 aa, synthetic construct
IAGVQN

SEQ ID NO: 4878 - protein, 6 aa, synthetic construct
IASVQN

SEQ ID NO: 4879 - protein, 6 aa, synthetic construct
IGGVQN

SEQ ID NO: 4880 - protein, 6 aa, synthetic construct
IGSVQN

SEQ ID NO: 4881 - protein, 6 aa, synthetic construct
ILGVQN

SEQ ID NO: 4882 - protein, 6 aa, synthetic construct
IQPVQN

SEQ ID NO: 4883 - protein, 6 aa, synthetic construct
IQSVQN

SEQ ID NO: 4884 - protein, 6 aa, synthetic construct
ISGVQN

SEQ ID NO: 4885 - protein, 6 aa, synthetic construct
ISPVQN

SEQ ID NO: 4886 - protein, 6 aa, synthetic construct
ISSVQN

SEQ ID NO: 4887 - protein, 6 aa, synthetic construct
ITPVQN

SEQ ID NO: 4888 - protein, 6 aa, synthetic construct
LAGVQN

SEQ ID NO: 4889 - protein, 6 aa, synthetic construct
LAHVQN

SEQ ID NO: 4890 - protein, 6 aa, synthetic construct
LANVQN

SEQ ID NO: 4891 - protein, 6 aa, synthetic construct
LAPVQN

SEQ ID NO: 4892 - protein, 6 aa, synthetic construct
LAPVQT

SEQ ID NO: 4893 - protein, 6 aa, synthetic construct
LAQVQN

SEQ ID NO: 4894 - protein, 6 aa, synthetic construct
LARVQN

SEQ ID NO: 4895 - protein, 6 aa, synthetic construct
LASVQN

SEQ ID NO: 4896 - protein, 6 aa, synthetic construct
LATVQN

SEQ ID NO: 4897 - protein, 6 aa, synthetic construct
LGPVQN

SEQ ID NO: 4898 - protein, 6 aa, synthetic construct
LGQVQN

SEQ ID NO: 4899 - protein, 6 aa, synthetic construct
LGSVQN

SEQ ID NO: 4900 - protein, 6 aa, synthetic construct
LHPVQN

SEQ ID NO: 4901 - protein, 6 aa, synthetic construct
LKSVQN

SEQ ID NO: 4902 - protein, 6 aa, synthetic construct
LMAVQN

SEQ ID NO: 4903 - protein, 6 aa, synthetic construct
LMGVQN

SEQ ID NO: 4904 - protein, 6 aa, synthetic construct
LMPVQN

SEQ ID NO: 4905 - protein, 6 aa, synthetic construct
LMQVQN

SEQ ID NO: 4906 - protein, 6 aa, synthetic construct
LMSVQN

SEQ ID NO: 4907 - protein, 6 aa, synthetic construct
LNPVQN

SEQ ID NO: 4908 - protein, 6 aa, synthetic construct
LQPVQN

SEQ ID NO: 4909 - protein, 6 aa, synthetic construct
LQQVQN

SEQ ID NO: 4910 - protein, 6 aa, synthetic construct
LQRVQN

SEQ ID NO: 4911 - protein, 6 aa, synthetic construct
LSHVQN

SEQ ID NO: 4912 - protein, 6 aa, synthetic construct
LSKVQN

SEQ ID NO: 4913 - protein, 6 aa, synthetic construct
LSPVQK

SEQ ID NO: 4914 - protein, 6 aa, synthetic construct
LSPVQN

SEQ ID NO: 4915 - protein, 6 aa, synthetic construct
LSQVQN

SEQ ID NO: 4916 - protein, 6 aa, synthetic construct
LSRVQN

SEQ ID NO: 4917 - protein, 6 aa, synthetic construct
LSTVQN

SEQ ID NO: 4918 - protein, 6 aa, synthetic construct
LTAVQN

SEQ ID NO: 4919 - protein, 6 aa, synthetic construct
LTNVQN

SEQ ID NO: 4920 - protein, 6 aa, synthetic construct
LTSVQN

SEQ ID NO: 4921 - protein, 6 aa, synthetic construct
MAPVQN

SEQ ID NO: 4922 - protein, 6 aa, synthetic construct
NAQVQN

SEQ ID NO: 4923 - protein, 6 aa, synthetic construct
NASVQN

SEQ ID NO: 4924 - protein, 6 aa, synthetic construct
NMQVQN

SEQ ID NO: 4925 - protein, 6 aa, synthetic construct
NSPVQN

SEQ ID NO: 4926 - protein, 6 aa, synthetic construct
NTPVQN

SEQ ID NO: 4927 - protein, 6 aa, synthetic construct
NVQVQN

SEQ ID NO: 4928 - protein, 6 aa, synthetic construct
QAPVQN

SEQ ID NO: 4929 - protein, 6 aa, synthetic construct
RAAVQN

SEQ ID NO: 4930 - protein, 6 aa, synthetic construct
RAQVQN

SEQ ID NO: 4931 - protein, 6 aa, synthetic construct
RASVQN

SEQ ID NO: 4932 - protein, 6 aa, synthetic construct
RGGVQN

SEQ ID NO: 4933 - protein, 6 aa, synthetic construct
RGSVQN

SEQ ID NO: 4934 - protein, 6 aa, synthetic construct
RIAVQN

SEQ ID NO: 4935 - protein, 6 aa, synthetic construct
RIGVQN

SEQ ID NO: 4936 - protein, 6 aa, synthetic construct
RIPVQN

SEQ ID NO: 4937 - protein, 6 aa, synthetic construct
RLGVQN

SEQ ID NO: 4938 - protein, 6 aa, synthetic construct
RLSVQN

SEQ ID NO: 4939 - protein, 6 aa, synthetic construct
RMSVQN

SEQ ID NO: 4940 - protein, 6 aa, synthetic construct
RNSVQN

SEQ ID NO: 4941 - protein, 6 aa, synthetic construct
RQPVQN

SEQ ID NO: 4942 - protein, 6 aa, synthetic construct
RSAVQN

SEQ ID NO: 4943 - protein, 6 aa, synthetic construct
RSGVQN

SEQ ID NO: 4944 - protein, 6 aa, synthetic construct
RSPVQN

SEQ ID NO: 4945 - protein, 6 aa, synthetic construct
RSQVQN

SEQ ID NO: 4946 - protein, 6 aa, synthetic construct
RSSVQN

SEQ ID NO: 4947 - protein, 6 aa, synthetic construct
RSTVQN

SEQ ID NO: 4948 - protein, 6 aa, synthetic construct
RTAVQN

SEQ ID NO: 4949 - protein, 6 aa, synthetic construct
RTGVQN

SEQ ID NO: 4950 - protein, 6 aa, synthetic construct
RTLVQN

SEQ ID NO: 4951 - protein, 6 aa, synthetic construct
RTSVQN

SEQ ID NO: 4952 - protein, 6 aa, synthetic construct
RTTVQN

SEQ ID NO: 4953 - protein, 6 aa, synthetic construct
RVEVQN

SEQ ID NO: 4954 - protein, 6 aa, synthetic construct
SAAVQN

SEQ ID NO: 4955 - protein, 6 aa, synthetic construct
SAKVQN

SEQ ID NO: 4956 - protein, 6 aa, synthetic construct
SAMVQN

SEQ ID NO: 4957 - protein, 6 aa, synthetic construct
SAQVQN

SEQ ID NO: 4958 - protein, 6 aa, synthetic construct
SGPVQN

SEQ ID NO: 4959 - protein, 6 aa, synthetic construct
SMAVQN

SEQ ID NO: 4960 - protein, 6 aa, synthetic construct
SMGVQN

SEQ ID NO: 4961 - protein, 6 aa, synthetic construct
SMQVQN

SEQ ID NO: 4962 - protein, 6 aa, synthetic construct
SMSVQN

SEQ ID NO: 4963 - protein, 6 aa, synthetic construct
STPVQN

SEQ ID NO: 4964 - protein, 6 aa, synthetic construct
SVAVQN

SEQ ID NO: 4965 - protein, 6 aa, synthetic construct
SVGVQN

SEQ ID NO: 4966 - protein, 6 aa, synthetic construct
TAAVQN

SEQ ID NO: 4967 - protein, 6 aa, synthetic construct
TAGVQN

SEQ ID NO: 4968 - protein, 6 aa, synthetic construct
TAKVQN

SEQ ID NO: 4969 - protein, 6 aa, synthetic construct
TAMVQN

SEQ ID NO: 4970 - protein, 6 aa, synthetic construct
TANVQN

SEQ ID NO: 4971 - protein, 6 aa, synthetic construct
TAPVQN

SEQ ID NO: 4972 - protein, 6 aa, synthetic construct
TAPVQT

SEQ ID NO: 4973 - protein, 6 aa, synthetic construct
TAQVQN

SEQ ID NO: 4974 - protein, 6 aa, synthetic construct
TASVQN

SEQ ID NO: 4975 - protein, 6 aa, synthetic construct
TASVQT

SEQ ID NO: 4976 - protein, 6 aa, synthetic construct
TATVQN

SEQ ID NO: 4977 - protein, 6 aa, synthetic construct
TAVVQN

SEQ ID NO: 4978 - protein, 6 aa, synthetic construct
TAWDQN

SEQ ID NO: 4979 - protein, 6 aa, synthetic construct
TAWVQH

SEQ ID NO: 4980 - protein, 6 aa, synthetic construct
TAWVQT

SEQ ID NO: 4981 - protein, 6 aa, synthetic construct
TGAVQN

SEQ ID NO: 4982 - protein, 6 aa, synthetic construct
TGCFQN

SEQ ID NO: 4983 - protein, 6 aa, synthetic construct
TGGAQN

SEQ ID NO: 4984 - protein, 6 aa, synthetic construct
TGGFQN

SEQ ID NO: 4985 - protein, 6 aa, synthetic construct
TGGVLN

SEQ ID NO: 4986 - protein, 6 aa, synthetic construct
TGGVQH

SEQ ID NO: 4987 - protein, 6 aa, synthetic construct
TGGVQK

SEQ ID NO: 4988 - protein, 6 aa, synthetic construct
TGGVQT

SEQ ID NO: 4989 - protein, 6 aa, synthetic construct
TGPVQN

SEQ ID NO: 4990 - protein, 6 aa, synthetic construct
TGSAQN

SEQ ID NO: 4991 - protein, 6 aa, synthetic construct
TGSLQN

SEQ ID NO: 4992 - protein, 6 aa, synthetic construct
TGSVQH

SEQ ID NO: 4993 - protein, 6 aa, synthetic construct
TGSVQI

SEQ ID NO: 4994 - protein, 6 aa, synthetic construct
TGSVQS

SEQ ID NO: 4995 - protein, 6 aa, synthetic construct
TGSVQT

SEQ ID NO: 4996 - protein, 6 aa, synthetic construct
TGTVQN

SEQ ID NO: 4997 - protein, 6 aa, synthetic construct
TGWEQN

SEQ ID NO: 4998 - protein, 6 aa, synthetic construct
TGWFQN

SEQ ID NO: 4999 - protein, 6 aa, synthetic construct
TGWGQT

SEQ ID NO: 5000 - protein, 6 aa, synthetic construct
TGWVPN

SEQ ID NO: 5001 - protein, 6 aa, synthetic construct
TGWVQD

SEQ ID NO: 5002 - protein, 6 aa, synthetic construct
TGWVQP

SEQ ID NO: 5003 - protein, 6 aa, synthetic construct
TGWVQT

SEQ ID NO: 5004 - protein, 6 aa, synthetic construct
TGWVRN

SEQ ID NO: 5005 - protein, 6 aa, synthetic construct
TKAVQN

SEQ ID NO: 5006 - protein, 6 aa, synthetic construct
TKPVQN

SEQ ID NO: 5007 - protein, 6 aa, synthetic construct
TKQVQN

SEQ ID NO: 5008 - protein, 6 aa, synthetic construct
TKSVQN

SEQ ID NO: 5009 - protein, 6 aa, synthetic construct
TLPVQN

SEQ ID NO: 5010 - protein, 6 aa, synthetic construct
TLQVQN

SEQ ID NO: 5011 - protein, 6 aa, synthetic construct
TMAVQN

SEQ ID NO: 5012 - protein, 6 aa, synthetic construct
TMGVQN

SEQ ID NO: 5013 - protein, 6 aa, synthetic construct
TMKVQN

SEQ ID NO: 5014 - protein, 6 aa, synthetic construct
TMNVQN

SEQ ID NO: 5015 - protein, 6 aa, synthetic construct
TMPVQN

SEQ ID NO: 5016 - protein, 6 aa, synthetic construct
TMQVQN

SEQ ID NO: 5017 - protein, 6 aa, synthetic construct
TMSVKN

SEQ ID NO: 5018 - protein, 6 aa, synthetic construct
TMSVQN

SEQ ID NO: 5019 - protein, 6 aa, synthetic construct
TMSVQT

SEQ ID NO: 5020 - protein, 6 aa, synthetic construct
TMTVQN

SEQ ID NO: 5021 - protein, 6 aa, synthetic construct
TNAVQN

SEQ ID NO: 5022 - protein, 6 aa, synthetic construct
TNQVQN

SEQ ID NO: 5023 - protein, 6 aa, synthetic construct
TNSVQN

SEQ ID NO: 5024 - protein, 6 aa, synthetic construct
TPPVQN

SEQ ID NO: 5025 - protein, 6 aa, synthetic construct
TQHVQN

SEQ ID NO: 5026 - protein, 6 aa, synthetic construct
TQKVQN

SEQ ID NO: 5027 - protein, 6 aa, synthetic construct
TQMVQN

SEQ ID NO: 5028 - protein, 6 aa, synthetic construct
TQNVQN

SEQ ID NO: 5029 - protein, 6 aa, synthetic construct
TQPVQN

SEQ ID NO: 5030 - protein, 6 aa, synthetic construct
TQQVQN

SEQ ID NO: 5031 - protein, 6 aa, synthetic construct
TQTVQN

SEQ ID NO: 5032 - protein, 6 aa, synthetic construct
TRWDQN

SEQ ID NO: 5033 - protein, 6 aa, synthetic construct
TSAVQN

SEQ ID NO: 5034 - protein, 6 aa, synthetic construct
TSGVQN

SEQ ID NO: 5035 - protein, 6 aa, synthetic construct
TSHVQN

SEQ ID NO: 5036 - protein, 6 aa, synthetic construct
TSKVQN

SEQ ID NO: 5037 - protein, 6 aa, synthetic construct
TSLVQN

SEQ ID NO: 5038 - protein, 6 aa, synthetic construct
TSMVQN

SEQ ID NO: 5039 - protein, 6 aa, synthetic construct
TSPDQN

SEQ ID NO: 5040 - protein, 6 aa, synthetic construct
TSQVQN

SEQ ID NO: 5041 - protein, 6 aa, synthetic construct
TSSVQN

SEQ ID NO: 5042 - protein, 6 aa, synthetic construct
TSSVQT

SEQ ID NO: 5043 - protein, 6 aa, synthetic construct
TSTVQN

SEQ ID NO: 5044 - protein, 6 aa, synthetic construct
TSVVQN

SEQ ID NO: 5045 - protein, 6 aa, synthetic construct
TTAVQN

SEQ ID NO: 5046 - protein, 6 aa, synthetic construct
TTGVQN

SEQ ID NO: 5047 - protein, 6 aa, synthetic construct
TTKVQN

SEQ ID NO: 5048 - protein, 6 aa, synthetic construct
TTPVQN

SEQ ID NO: 5049 - protein, 6 aa, synthetic construct
TTPVQT

SEQ ID NO: 5050 - protein, 6 aa, synthetic construct
TTQVQN

SEQ ID NO: 5051 - protein, 6 aa, synthetic construct
TTTVQN

SEQ ID NO: 5052 - protein, 6 aa, synthetic construct
TVAVQN

SEQ ID NO: 5053 - protein, 6 aa, synthetic construct
TVAVQT

SEQ ID NO: 5054 - protein, 6 aa, synthetic construct
TVGVQN

SEQ ID NO: 5055 - protein, 6 aa, synthetic construct
TVQVQN

SEQ ID NO: 5056 - protein, 6 aa, synthetic construct
TVSVKN

SEQ ID NO: 5057 - protein, 6 aa, synthetic construct
TVWVQK

SEQ ID NO: 5058 - protein, 6 aa, synthetic construct
VAAVQN

SEQ ID NO: 5059 - protein, 6 aa, synthetic construct
VAGVQN

SEQ ID NO: 5060 - protein, 6 aa, synthetic construct
VAKVQN

SEQ ID NO: 5061 - protein, 6 aa, synthetic construct
VANVQN

SEQ ID NO: 5062 - protein, 6 aa, synthetic construct
VAQVQN

SEQ ID NO: 5063 - protein, 6 aa, synthetic construct
VASVQN

SEQ ID NO: 5064 - protein, 6 aa, synthetic construct
VATVQN

SEQ ID NO: 5065 - protein, 6 aa, synthetic construct
VGGVQN

SEQ ID NO: 5066 - protein, 6 aa, synthetic construct
VGKVQN

SEQ ID NO: 5067 - protein, 6 aa, synthetic construct
VGNVQN

SEQ ID NO: 5068 - protein, 6 aa, synthetic construct
VGSVQN

SEQ ID NO: 5069 - protein, 6 aa, synthetic construct
VHPVQN

SEQ ID NO: 5070 - protein, 6 aa, synthetic construct
VKAVQN

SEQ ID NO: 5071 - protein, 6 aa, synthetic construct
VKPVQN

SEQ ID NO: 5072 - protein, 6 aa, synthetic construct
VKQVQN

SEQ ID NO: 5073 - protein, 6 aa, synthetic construct
VLPVQN

SEQ ID NO: 5074 - protein, 6 aa, synthetic construct
VLSVQN

SEQ ID NO: 5075 - protein, 6 aa, synthetic construct
VMAVQN

SEQ ID NO: 5076 - protein, 6 aa, synthetic construct
VMQVQN

SEQ ID NO: 5077 - protein, 6 aa, synthetic construct
VMSVQN

SEQ ID NO: 5078 - protein, 6 aa, synthetic construct
VNAVQN

SEQ ID NO: 5079 - protein, 6 aa, synthetic construct
VNGVQN

SEQ ID NO: 5080 - protein, 6 aa, synthetic construct
VNSVQN

SEQ ID NO: 5081 - protein, 6 aa, synthetic construct
VQAVQN

SEQ ID NO: 5082 - protein, 6 aa, synthetic construct
VQNVQN

SEQ ID NO: 5083 - protein, 6 aa, synthetic construct
VQPVQN

SEQ ID NO: 5084 - protein, 6 aa, synthetic construct
VQQVQN

SEQ ID NO: 5085 - protein, 6 aa, synthetic construct
VQSVQN

SEQ ID NO: 5086 - protein, 6 aa, synthetic construct
VQTVQN

SEQ ID NO: 5087 - protein, 6 aa, synthetic construct
VRPVQN

SEQ ID NO: 5088 - protein, 6 aa, synthetic construct
VSAVQN

SEQ ID NO: 5089 - protein, 6 aa, synthetic construct
VSGVQN

SEQ ID NO: 5090 - protein, 6 aa, synthetic construct
VSNVQN

SEQ ID NO: 5091 - protein, 6 aa, synthetic construct
VSPVQT

SEQ ID NO: 5092 - protein, 6 aa, synthetic construct
VSQVQN

SEQ ID NO: 5093 - protein, 6 aa, synthetic construct
VSRVQN

SEQ ID NO: 5094 - protein, 6 aa, synthetic construct
VSSVQK

SEQ ID NO: 5095 - protein, 6 aa, synthetic construct
VSSVQT

SEQ ID NO: 5096 - protein, 6 aa, synthetic construct
VSTVQN

SEQ ID NO: 5097 - protein, 6 aa, synthetic construct
VTAVQN

SEQ ID NO: 5098 - protein, 6 aa, synthetic construct
VTGVQN

SEQ ID NO: 5099 - protein, 6 aa, synthetic construct
VTKVQN

SEQ ID NO: 5100 - protein, 6 aa, synthetic construct
VTPVQN

SEQ ID NO: 5101 - protein, 6 aa, synthetic construct
VTSVQN

SEQ ID NO: 5102 - protein, 6 aa, synthetic construct
TGLVQN

SEQ ID NO: 5103 - protein, 6 aa, synthetic construct
TGWVKN

SEQ ID NO: 5104 - protein, 6 aa, synthetic construct
PGWVQN

SEQ ID NO: 5105 - protein, 6 aa, synthetic construct
TGWVQH

SEQ ID NO: 5106 - protein, 6 aa, synthetic construct
LSGVQN

SEQ ID NO: 5107 - protein, 6 aa, synthetic construct
LSSVQN

SEQ ID NO: 5108 - protein, 6 aa, synthetic construct
LVPVQN

SEQ ID NO: 5109 - protein, 6 aa, synthetic construct
LSPVKN

SEQ ID NO: 5110 - protein, 7 aa, synthetic construct
PLNGAVN

SEQ ID NO: 5111 - protein, 7 aa, synthetic construct
PLNGAVQ

SEQ ID NO: 5112 - protein, 7 aa, synthetic construct
PLNGAIH

SEQ ID NO: 5113 - protein, 7 aa, synthetic construct
PLNGALH

SEQ ID NO: 5114 - protein, 7 aa, synthetic construct
PLNGAVP

SEQ ID NO: 5115 - protein, 7 aa, synthetic construct
PLNGAVD

SEQ ID NO: 5116 - protein, 7 aa, synthetic construct
PLNGAAH

SEQ ID NO: 5117 - protein, 7 aa, synthetic construct
PLNGAFH

SEQ ID NO: 5118 - protein, 7 aa, synthetic construct
PLNGADH

SEQ ID NO: 5119 - protein, 7 aa, synthetic construct
PLNGAVL

SEQ ID NO: 5120 - protein, 7 aa, synthetic construct
PLNGAGH

SEQ ID NO: 5121 - protein, 7 aa, synthetic construct
PLNGAVR

SEQ ID NO: 5122 - protein, 7 aa, synthetic construct
PLNGAVY

SEQ ID NO: 5123 - protein, 9 aa, synthetic construct
PLNGAVNLY

SEQ ID NO: 5124 - protein, 9 aa, synthetic construct
PLNGAVQLY

SEQ ID NO: 5125 - protein, 9 aa, synthetic construct
PLNGAIHLY

SEQ ID NO: 5126 - protein, 9 aa, synthetic construct
PLNGALHLY

SEQ ID NO: 5127 - protein, 9 aa, synthetic construct
PLNGAVPLY

SEQ ID NO: 5128 - protein, 9 aa, synthetic construct
PLNGAVDLY

SEQ ID NO: 5129 - protein, 9 aa, synthetic construct
PLNGAAHLY

SEQ ID NO: 5130 - protein, 9 aa, synthetic construct
PLNGAVHRY

SEQ ID NO: 5131 - protein, 9 aa, synthetic construct
PLNGAFHLY

SEQ ID NO: 5132 - protein, 9 aa, synthetic construct
PLNGADHLY

SEQ ID NO: 5133 - protein, 9 aa, synthetic construct
PLNGAVLLY

SEQ ID NO: 5134 - protein, 9 aa, synthetic construct
PLNGAGHLY

SEQ ID NO: 5135 - protein, 9 aa, synthetic construct
PLNGAVRLY

SEQ ID NO: 5136 - protein, 9 aa, synthetic construct
PLNGAVHVY

SEQ ID NO: 5137 - protein, 9 aa, synthetic construct
PLNGAVYLY

SEQ ID NO: 5138 - protein, 8 aa, synthetic construct
VHLYAHAQ

SEQ ID NO: 5139 - protein, 8 aa, synthetic construct
VNLYAQAQ

SEQ ID NO: 5140 - protein, 8 aa, synthetic construct
VQLYAQAQ

SEQ ID NO: 5141 - protein, 8 aa, synthetic construct
VHLYAQEQ

SEQ ID NO: 5142 - protein, 8 aa, synthetic construct
IHLYAQAQ

SEQ ID NO: 5143 - protein, 8 aa, synthetic construct
LHLYAQAQ

SEQ ID NO: 5144 - protein, 8 aa, synthetic construct
VPLYAQAQ

SEQ ID NO: 5145 - protein, 8 aa, synthetic construct
VHLYAQAK

SEQ ID NO: 5146 - protein, 8 aa, synthetic construct
VDLYAQAQ

SEQ ID NO: 5147 - protein, 8 aa, synthetic construct
AHLYAQAQ

SEQ ID NO: 5148 - protein, 8 aa, synthetic construct
VHRYAQAQ

SEQ ID NO: 5149 - protein, 8 aa, synthetic construct
FHLYAQAQ

SEQ ID NO: 5150 - protein, 8 aa, synthetic construct
VHLYALAQ

SEQ ID NO: 5151 - protein, 8 aa, synthetic construct
DHLYAQAQ

SEQ ID NO: 5152 - protein, 8 aa, synthetic construct
VHLYAPAQ

SEQ ID NO: 5153 - protein, 8 aa, synthetic construct
VHLYARAQ

SEQ ID NO: 5154 - protein, 8 aa, synthetic construct
VHLYAQAH

SEQ ID NO: 5155 - protein, 8 aa, synthetic construct
VLLYAQAQ

SEQ ID NO: 5156 - protein, 8 aa, synthetic construct
VHLYAQAP

SEQ ID NO: 5157 - protein, 8 aa, synthetic construct
GHLYAQAQ

SEQ ID NO: 5158 - protein, 8 aa, synthetic construct
VRLYAQAQ

SEQ ID NO: 5159 - protein, 8 aa, synthetic construct
VYLYAQAQ

SEQ ID NO: 5160 - protein, 8 aa, synthetic construct
VHLYTQAQ

SEQ ID NO: 5161 - protein, 11 aa, synthetic construct
PLNGAVHLYAH

SEQ ID NO: 5162 - protein, 11 aa, synthetic construct
PLNGAVNLYAQ

SEQ ID NO: 5163 - protein, 11 aa, synthetic construct
PLNGAVQLYAQ

SEQ ID NO: 5164 - protein, 11 aa, synthetic construct
PLNGAIHLYAQ

SEQ ID NO: 5165 - protein, 11 aa, synthetic construct
PLNGALHLYAQ

SEQ ID NO: 5166 - protein, 11 aa, synthetic construct
PLNGAVPLYAQ

SEQ ID NO: 5167 - protein, 11 aa, synthetic construct
PLNGAVDLYAQ

SEQ ID NO: 5168 - protein, 11 aa, synthetic construct
PLNGAAHLYAQ

SEQ ID NO: 5169 - protein, 11 aa, synthetic construct
PLNGAVHRYAQ

SEQ ID NO: 5170 - protein, 11 aa, synthetic construct
PLNGAFHLYAQ

SEQ ID NO: 5171 - protein, 11 aa, synthetic construct
PLNGAVHLYAL

SEQ ID NO: 5172 - protein, 11 aa, synthetic construct
PLNGADHLYAQ

SEQ ID NO: 5173 - protein, 11 aa, synthetic construct
PLNGAVHLYAP

SEQ ID NO: 5174 - protein, 11 aa, synthetic construct
PLNGAVHLYAR

SEQ ID NO: 5175 - protein, 11 aa, synthetic construct
PLNGAVLLYAQ

SEQ ID NO: 5176 - protein, 11 aa, synthetic construct
PLNGAGHLYAQ

SEQ ID NO: 5177 - protein, 11 aa, synthetic construct
PLNGAVRLYAQ

SEQ ID NO: 5178 - protein, 11 aa, synthetic construct
PLNGAVHVYAQ

SEQ ID NO: 5179 - protein, 11 aa, synthetic construct
PLNGAVYLYAQ

SEQ ID NO: 5180 - protein, 11 aa, synthetic construct
PLNGAVHLYTQ

SEQ ID NO: 5181 - protein, 13 aa, synthetic construct
PLNGAVHLYAHAQ

SEQ ID NO: 5182 - protein, 13 aa, synthetic construct
PLNGAVNLYAQAQ

SEQ ID NO: 5183 - protein, 13 aa, synthetic construct
PLNGAVQLYAQAQ

SEQ ID NO: 5184 - protein, 13 aa, synthetic construct
PLNGAVHLYAQEQ

SEQ ID NO: 5185 - protein, 13 aa, synthetic construct
PLNGAIHLYAQAQ

SEQ ID NO: 5186 - protein, 13 aa, synthetic construct
PLNGALHLYAQAQ

SEQ ID NO: 5187 - protein, 13 aa, synthetic construct
PLNGAVPLYAQAQ

SEQ ID NO: 5188 - protein, 13 aa, synthetic construct
PLNGAVHLYAQAK

SEQ ID NO: 5189 - protein, 13 aa, synthetic construct
PLNGAVDLYAQAQ

SEQ ID NO: 5190 - protein, 13 aa, synthetic construct
PLNGAAHLYAQAQ

SEQ ID NO: 5191 - protein, 13 aa, synthetic construct
PLNGAVHRYAQAQ

SEQ ID NO: 5192 - protein, 13 aa, synthetic construct
PLNGAFHLYAQAQ

SEQ ID NO: 5193 - protein, 13 aa, synthetic construct
PLNGAVHLYALAQ

SEQ ID NO: 5194 - protein, 13 aa, synthetic construct
PLNGADHLYAQAQ

SEQ ID NO: 5195 - protein, 13 aa, synthetic construct
PLNGAVHLYAPAQ

SEQ ID NO: 5196 - protein, 13 aa, synthetic construct
PLNGAVHLYARAQ

SEQ ID NO: 5197 - protein, 13 aa, synthetic construct
PLNGAVHLYAQAH

SEQ ID NO: 5198 - protein, 13 aa, synthetic construct
PLNGAVLLYAQAQ

SEQ ID NO: 5199 - protein, 13 aa, synthetic construct
PLNGAVHLYAQAP

SEQ ID NO: 5200 - protein, 13 aa, synthetic construct
PLNGAGHLYAQAQ

SEQ ID NO: 5201 - protein, 13 aa, synthetic construct
PLNGAVRLYAQAQ

SEQ ID NO: 5202 - protein, 13 aa, synthetic construct
PLNGAVHVYAQAQ

SEQ ID NO: 5203 - protein, 13 aa, synthetic construct
PLNGAVYLYAQAQ

SEQ ID NO: 5204 - protein, 13 aa, synthetic construct
PLNGAVHLYTQAQ

SEQ ID NO: 5205 - protein, 6 aa, synthetic construct
TMMVQN

SEQ ID NO: 5206 - protein, 6 aa, synthetic construct
TGGVQS

SEQ ID NO: 5207 - protein, 6 aa, synthetic construct
TGSFQN

SEQ ID NO: 5208 - protein, 6 aa, synthetic construct
RSVVQN

SEQ ID NO: 5209 - protein, 6 aa, synthetic construct
TGSVQK

SEQ ID NO: 5210 - protein, 6 aa, synthetic construct
TQLVQN

SEQ ID NO: 5211 - protein, 6 aa, synthetic construct
TGGVHN

SEQ ID NO: 5212 - protein, 6 aa, synthetic construct
RTPVQN

SEQ ID NO: 5213 - protein, 6 aa, synthetic construct
RQQVQN

SEQ ID NO: 5214 - protein, 6 aa, synthetic construct
TGSVRN

SEQ ID NO: 5215 - protein, 6 aa, synthetic construct
VQGVQN

SEQ ID NO: 5216 - protein, 6 aa, synthetic construct
PGWVQT

SEQ ID NO: 5217 - protein, 6 aa, synthetic construct
STQVQN

SEQ ID NO: 5218 - protein, 6 aa, synthetic construct
QSPVQN

SEQ ID NO: 5219 - protein, 6 aa, synthetic construct
RYSVQN

SEQ ID NO: 5220 - protein, 6 aa, synthetic construct
TQRVQN

SEQ ID NO: 5221 - protein, 6 aa, synthetic construct
SAGVQN

SEQ ID NO: 5222 - protein, 6 aa, synthetic construct
SAPVQT

SEQ ID NO: 5223 - protein, 6 aa, synthetic construct
RQSVQN

SEQ ID NO: 5224 - protein, 6 aa, synthetic construct
SQPVQN

SEQ ID NO: 5225 - protein, 6 aa, synthetic construct
VASVKN

SEQ ID NO: 5226 - protein, 6 aa, synthetic construct
TAWVRN

SEQ ID NO: 5227 - protein, 6 aa, synthetic construct
TGGGQN

SEQ ID NO: 5228 - protein, 6 aa, synthetic construct
STSVQN

SEQ ID NO: 5229 - protein, 6 aa, synthetic construct
VLGVQN

SEQ ID NO: 5230 - protein, 6 aa, synthetic construct
NQPVQN

SEQ ID NO: 5231 - protein, 6 aa, synthetic construct
LGTVQN

SEQ ID NO: 5232 - protein, 6 aa, synthetic construct
RAGVQN

SEQ ID NO: 5233 - protein, 6 aa, synthetic construct
TGGVKN

SEQ ID NO: 5234 - protein, 6 aa, synthetic construct
TAWLQN

SEQ ID NO: 5235 - protein, 6 aa, synthetic construct
TRWVQK

SEQ ID NO: 5236 - protein, 6 aa, synthetic construct
LAPVKN

SEQ ID NO: 5237 - protein, 6 aa, synthetic construct
TGSVQD

SEQ ID NO: 5238 - protein, 6 aa, synthetic construct
TGMVQN

SEQ ID NO: 5239 - protein, 6 aa, synthetic construct
LSNVQN

SEQ ID NO: 5240 - protein, 6 aa, synthetic construct
RLPVQN

SEQ ID NO: 5241 - protein, 6 aa, synthetic construct
RQGVQN

SEQ ID NO: 5242 - protein, 6 aa, synthetic construct
STPVQT

SEQ ID NO: 5243 - protein, 6 aa, synthetic construct
TTPVKN

SEQ ID NO: 5244 - protein, 6 aa, synthetic construct
RLTVQN

SEQ ID NO: 5245 - protein, 6 aa, synthetic construct
TLRVQN

SEQ ID NO: 5246 - protein, 6 aa, synthetic construct
SAFVQN

SEQ ID NO: 5247 - protein, 6 aa, synthetic construct
SVQVQN

SEQ ID NO: 5248 - protein, 6 aa, synthetic construct
LLPVQN

SEQ ID NO: 5249 - protein, 6 aa, synthetic construct
RTQVQN

SEQ ID NO: 5250 - protein, 6 aa, synthetic construct
TGSDQN

SEQ ID NO: 5251 - protein, 6 aa, synthetic construct
VASDQN

SEQ ID NO: 5252 - protein, 6 aa, synthetic construct
VSPVKN

SEQ ID NO: 5253 - protein, 6 aa, synthetic construct
LPPVQN

SEQ ID NO: 5254 - protein, 6 aa, synthetic construct
SSPVQT

SEQ ID NO: 5255 - protein, 6 aa, synthetic construct
AQPVQN

SEQ ID NO: 5256 - protein, 6 aa, synthetic construct
TPQVQN

SEQ ID NO: 5257 - protein, 6 aa, synthetic construct
TSWVQN

SEQ ID NO: 5258 - protein, 6 aa, synthetic construct
TGGDQN

SEQ ID NO: 5259 - protein, 6 aa, synthetic construct
SSPVKN

SEQ ID NO: 5260 - protein, 6 aa, synthetic construct
NTTVQN

SEQ ID NO: 5261 - protein, 6 aa, synthetic construct
TTRVQN

SEQ ID NO: 5262 - protein, 6 aa, synthetic construct
TQWVQN

SEQ ID NO: 5263 - protein, 6 aa, synthetic construct
TGSVHN

SEQ ID NO: 5264 - protein, 6 aa, synthetic construct
TGGLQN

SEQ ID NO: 5265 - protein, 6 aa, synthetic construct
TAWVQK

SEQ ID NO: 5266 - protein, 6 aa, synthetic construct
TGRVQT

SEQ ID NO: 5267 - protein, 6 aa, synthetic construct
NTQVQN

SEQ ID NO: 5268 - protein, 6 aa, synthetic construct
TGWLQN

SEQ ID NO: 5269 - protein, 6 aa, synthetic construct
TYAVQN

SEQ ID NO: 5270 - protein, 6 aa, synthetic construct
TLSVQN

SEQ ID NO: 5271 - protein, 6 aa, synthetic construct
NLPVQN

SEQ ID NO: 5272 - protein, 6 aa, synthetic construct
TSSDQN

SEQ ID NO: 5273 - protein, 6 aa, synthetic construct
ATSVQN

SEQ ID NO: 5274 - protein, 6 aa, synthetic construct
TAWFQN

SEQ ID NO: 5275 - protein, 6 aa, synthetic construct
ATQVQN

SEQ ID NO: 5276 - protein, 6 aa, synthetic construct
VSSVKN

SEQ ID NO: 5277 - protein, 6 aa, synthetic construct
TGSGQN

SEQ ID NO: 5278 - protein, 6 aa, synthetic construct
LQPVQT

SEQ ID NO: 5279 - protein, 6 aa, synthetic construct
VSAVKN

SEQ ID NO: 5280 - protein, 6 aa, synthetic construct
TQAVQN

SEQ ID NO: 5281 - protein, 6 aa, synthetic construct
TGWVQK

SEQ ID NO: 5282 - protein, 6 aa, synthetic construct
VMPVQN

SEQ ID NO: 5283 - protein, 6 aa, synthetic construct
TVSVQK

SEQ ID NO: 5284 - protein, 6 aa, synthetic construct
TAWAQN

SEQ ID NO: 5285 - protein, 6 aa, synthetic construct
NALVQN

SEQ ID NO: 5286 - protein, 6 aa, synthetic construct
RMLVQN

SEQ ID NO: 5287 - protein, 6 aa, synthetic construct
TVAVKN

SEQ ID NO: 5288 - protein, 6 aa, synthetic construct
RQLVQN

SEQ ID NO: 5289 - protein, 6 aa, synthetic construct
TLGVQN

SEQ ID NO: 5290 - protein, 6 aa, synthetic construct
LGPVQT

SEQ ID NO: 5291 - protein, 6 aa, synthetic construct
TGSVKN

SEQ ID NO: 5292 - protein, 6 aa, synthetic construct
TMSDQN

SEQ ID NO: 5293 - protein, 6 aa, synthetic construct
LASVKN

SEQ ID NO: 5294 - protein, 6 aa, synthetic construct
TGFVQN

SEQ ID NO: 5295 - protein, 6 aa, synthetic construct
SALVQN

SEQ ID NO: 5296 - protein, 6 aa, synthetic construct
TGWVKT

SEQ ID NO: 5297 - protein, 6 aa, synthetic construct
SQLVQN

SEQ ID NO: 5298 - protein, 6 aa, synthetic construct
TGWGQN

SEQ ID NO: 5299 - protein, 6 aa, synthetic construct
LSAVQN

SEQ ID NO: 5300 - protein, 6 aa, synthetic construct
TMQVQT

SEQ ID NO: 5301 - protein, 6 aa, synthetic construct
TGQVQN

SEQ ID NO: 5302 - protein, 6 aa, synthetic construct
TSPVKN

SEQ ID NO: 5303 - protein, 6 aa, synthetic construct
LSQVQT

SEQ ID NO: 5304 - protein, 6 aa, synthetic construct
TGSVLN

SEQ ID NO: 5305 - protein, 6 aa, synthetic construct
TNGVQN

SEQ ID NO: 5306 - protein, 6 aa, synthetic construct
TGWVKK

SEQ ID NO: 5307 - protein, 6 aa, synthetic construct
AAAVQN

SEQ ID NO: 5308 - protein, 6 aa, synthetic construct
SAVVQN

SEQ ID NO: 5309 - protein, 6 aa, synthetic construct
PGWVQH

SEQ ID NO: 5310 - protein, 6 aa, synthetic construct
TASDQN

SEQ ID NO: 5311 - protein, 6 aa, synthetic construct
SSRVQN

SEQ ID NO: 5312 - protein, 6 aa, synthetic construct
SPPVQN

SEQ ID NO: 5313 - protein, 6 aa, synthetic construct
VQPVQT

SEQ ID NO: 5314 - protein, 6 aa, synthetic construct
TSSVKN

SEQ ID NO: 5315 - protein, 6 aa, synthetic construct
LSPLQN

SEQ ID NO: 5316 - protein, 6 aa, synthetic construct
VSQVQK

SEQ ID NO: 5317 - protein, 6 aa, synthetic construct
LVGVQN

SEQ ID NO: 5318 - protein, 6 aa, synthetic construct
TLSVKN

SEQ ID NO: 5319 - protein, 6 aa, synthetic construct
TGWFQK

SEQ ID NO: 5320 - protein, 6 aa, synthetic construct
TPAVQN

SEQ ID NO: 5321 - protein, 6 aa, synthetic construct
TVGVKN

SEQ ID NO: 5322 - protein, 6 aa, synthetic construct
KGWDQN

SEQ ID NO: 5323 - protein, 6 aa, synthetic construct
TAWVLN

SEQ ID NO: 5324 - protein, 6 aa, synthetic construct
VPPVQN

SEQ ID NO: 5325 - protein, 6 aa, synthetic construct
ATGVQN

SEQ ID NO: 5326 - protein, 6 aa, synthetic construct
TGGVQI

SEQ ID NO: 5327 - protein, 6 aa, synthetic construct
TGWVLN

SEQ ID NO: 5328 - protein, 6 aa, synthetic construct
TAWGQN

SEQ ID NO: 5329 - protein, 6 aa, synthetic construct
TGWVHN

SEQ ID NO: 5330 - protein, 6 aa, synthetic construct
LGSVQT

SEQ ID NO: 5331 - protein, 6 aa, synthetic construct
SANVQN

SEQ ID NO: 5332 - protein, 6 aa, synthetic construct
TGGVQD

SEQ ID NO: 5333 - protein, 6 aa, synthetic construct
TMAVKN

SEQ ID NO: 5334 - protein, 6 aa, synthetic construct
TASVKN

SEQ ID NO: 5335 - protein, 6 aa, synthetic construct
SSPVQK

SEQ ID NO: 5336 - protein, 6 aa, synthetic construct
TGTVQT

SEQ ID NO: 5337 - protein, 6 aa, synthetic construct
TGWVQI

SEQ ID NO: 5338 - protein, 6 aa, synthetic construct
TVWVKN

SEQ ID NO: 5339 - protein, 6 aa, synthetic construct
SQQVQN

SEQ ID NO: 5340 - protein, 6 aa, synthetic construct
VGSVQT

SEQ ID NO: 5341 - protein, 6 aa, synthetic construct
SSMVQN

SEQ ID NO: 5342 - protein, 6 aa, synthetic construct
TSPVQK

SEQ ID NO: 5343 - protein, 6 aa, synthetic construct
AVGVQN

SEQ ID NO: 5344 - protein, 6 aa, synthetic construct
VAPVQN

SEQ ID NO: 5345 - protein, 6 aa, synthetic construct
TLPVQK

SEQ ID NO: 5346 - protein, 6 aa, synthetic construct
TGRVQH

SEQ ID NO: 5347 - protein, 6 aa, synthetic construct
TPSVQN

SEQ ID NO: 5348 - protein, 6 aa, synthetic construct
TGWVEN

SEQ ID NO: 5349 - protein, 6 aa, synthetic construct
RGWVQN

SEQ ID NO: 5350 - protein, 6 aa, synthetic construct
TGSVEN

SEQ ID NO: 5351 - protein, 6 aa, synthetic construct
SSLVQN

SEQ ID NO: 5352 - protein, 6 aa, synthetic construct
TAWVKN

SEQ ID NO: 5353 - protein, 6 aa, synthetic construct
TYSVQN

SEQ ID NO: 5354 - protein, 6 aa, synthetic construct
LAAVQT

SEQ ID NO: 5355 - protein, 6 aa, synthetic construct
TALVKN

SEQ ID NO: 5356 - protein, 6 aa, synthetic construct
TGWVQY

SEQ ID NO: 5357 - protein, 6 aa, synthetic construct
TLPVQT

SEQ ID NO: 5358 - protein, 6 aa, synthetic construct
TGLVQH

SEQ ID NO: 5359 - protein, 6 aa, synthetic construct
TPTVQN

SEQ ID NO: 5360 - protein, 6 aa, synthetic construct
TASVQK

SEQ ID NO: 5361 - protein, 6 aa, synthetic construct
TSPVQI

SEQ ID NO: 5362 - protein, 6 aa, synthetic construct
IGWVQN

SEQ ID NO: 5363 - protein, 6 aa, synthetic construct
TGWDKN

SEQ ID NO: 5364 - protein, 6 aa, synthetic construct
KSSVQN

SEQ ID NO: 5365 - protein, 6 aa, synthetic construct
TGYVQN

SEQ ID NO: 5366 - protein, 6 aa, synthetic construct
RGWVQT

SEQ ID NO: 5367 - protein, 6 aa, synthetic construct
RSLVQN

SEQ ID NO: 5368 - protein, 6 aa, synthetic construct
TGGVEN

SEQ ID NO: 5369 - protein, 6 aa, synthetic construct
TGCVRN

SEQ ID NO: 5370 - protein, 6 aa, synthetic construct
LSPVQS

SEQ ID NO: 5371 - protein, 6 aa, synthetic construct
TGPVQT

SEQ ID NO: 5372 - protein, 6 aa, synthetic construct
TVGVQK

SEQ ID NO: 5373 - protein, 6 aa, synthetic construct
TASGQN

SEQ ID NO: 5374 - protein, 6 aa, synthetic construct
SVSVQN

SEQ ID NO: 5375 - protein, 6 aa, synthetic construct
SGPVQT

SEQ ID NO: 5376 - protein, 6 aa, synthetic construct
VMSVKN

SEQ ID NO: 5377 - protein, 6 aa, synthetic construct
LGSVQK

SEQ ID NO: 5378 - protein, 6 aa, synthetic construct
TGLVLN

SEQ ID NO: 5379 - protein, 6 aa, synthetic construct
TSNVQN

SEQ ID NO: 5380 - protein, 6 aa, synthetic construct
TGWGHN

SEQ ID NO: 5381 - protein, 6 aa, synthetic construct
SQMVQN

SEQ ID NO: 5382 - protein, 6 aa, synthetic construct
TVSVHN

SEQ ID NO: 5383 - protein, 6 aa, synthetic construct
LSSVQT

SEQ ID NO: 5384 - protein, 6 aa, synthetic construct
TASVRN

SEQ ID NO: 5385 - protein, 6 aa, synthetic construct
VPAVQN

SEQ ID NO: 5386 - protein, 6 aa, synthetic construct
TGRVQK

SEQ ID NO: 5387 - protein, 6 aa, synthetic construct
AMSVQN

SEQ ID NO: 5388 - protein, 6 aa, synthetic construct
TAWVHN

SEQ ID NO: 5389 - protein, 6 aa, synthetic construct
TGLVRN

SEQ ID NO: 5390 - protein, 6 aa, synthetic construct
RTLVQT

SEQ ID NO: 5391 - protein, 6 aa, synthetic construct
TGSIQN

SEQ ID NO: 5392 - protein, 6 aa, synthetic construct
LSSVKN

SEQ ID NO: 5393 - protein, 6 aa, synthetic construct
TLQVQK

SEQ ID NO: 5394 - protein, 6 aa, synthetic construct
VGSVKN

SEQ ID NO: 5395 - protein, 6 aa, synthetic construct
LAPLQN

SEQ ID NO: 5396 - protein, 6 aa, synthetic construct
TPGVQN

SEQ ID NO: 5397 - protein, 6 aa, synthetic construct
LSAVQT

SEQ ID NO: 5398 - protein, 6 aa, synthetic construct
TGVVQN

SEQ ID NO: 5399 - protein, 6 aa, synthetic construct
VPQVQN

SEQ ID NO: 5400 - protein, 6 aa, synthetic construct
TGCVQK

SEQ ID NO: 5401 - protein, 6 aa, synthetic construct
TRWVQT

SEQ ID NO: 5402 - protein, 6 aa, synthetic construct
TGLDQN

SEQ ID NO: 5403 - protein, 6 aa, synthetic construct
VSSVHN

SEQ ID NO: 5404 - protein, 6 aa, synthetic construct
KGWVQT

SEQ ID NO: 5405 - protein, 6 aa, synthetic construct
SLPVQN

SEQ ID NO: 5406 - protein, 6 aa, synthetic construct
TTSVHN

SEQ ID NO: 5407 - protein, 6 aa, synthetic construct
TVWVQN

SEQ ID NO: 5408 - protein, 6 aa, synthetic construct
TAQLQN

SEQ ID NO: 5409 - protein, 6 aa, synthetic construct
TRWVKN

SEQ ID NO: 5410 - protein, 6 aa, synthetic construct
TAWIQN

SEQ ID NO: 5411 - protein, 6 aa, synthetic construct
LSQVKN

SEQ ID NO: 5412 - protein, 6 aa, synthetic construct
TSTVKN

SEQ ID NO: 5413 - protein, 6 aa, synthetic construct
ALPVQN

SEQ ID NO: 5414 - protein, 6 aa, synthetic construct
TSMVQT

SEQ ID NO: 5415 - protein, 6 aa, synthetic construct
TSSVQH

SEQ ID NO: 5416 - protein, 6 aa, synthetic construct
TAMVKN

SEQ ID NO: 5417 - protein, 6 aa, synthetic construct
TPWVQN

SEQ ID NO: 5418 - protein, 6 aa, synthetic construct
TPRVQN

SEQ ID NO: 5419 - protein, 6 aa, synthetic construct
SSSVQN

SEQ ID NO: 5420 - protein, 6 aa, synthetic construct
RPPVQN

SEQ ID NO: 5421 - protein, 6 aa, synthetic construct
LAGVKN

SEQ ID NO: 5422 - protein, 6 aa, synthetic construct
TSPAQN

SEQ ID NO: 5423 - protein, 6 aa, synthetic construct
RSPVQT

SEQ ID NO: 5424 - protein, 6 aa, synthetic construct
TGWVPH

SEQ ID NO: 5425 - protein, 6 aa, synthetic construct
PGWGQN

SEQ ID NO: 5426 - protein, 6 aa, synthetic construct
IPPVQN

SEQ ID NO: 5427 - protein, 6 aa, synthetic construct
TGRVKN

SEQ ID NO: 5428 - protein, 6 aa, synthetic construct
TGRLQN

SEQ ID NO: 5429 - protein, 6 aa, synthetic construct
LSSVQH

SEQ ID NO: 5430 - protein, 6 aa, synthetic construct
AGWVQT

SEQ ID NO: 5431 - protein, 6 aa, synthetic construct
TGLVQS

SEQ ID NO: 5432 - protein, 6 aa, synthetic construct
TGCVQI

SEQ ID NO: 5433 - protein, 6 aa, synthetic construct
RPGVQN

SEQ ID NO: 5434 - protein, 6 aa, synthetic construct
TAAVQH

SEQ ID NO: 5435 - protein, 6 aa, synthetic construct
TGCDQN

SEQ ID NO: 5436 - protein, 6 aa, synthetic construct
TGRVRN

SEQ ID NO: 5437 - protein, 6 aa, synthetic construct
TGRDQN

SEQ ID NO: 5438-5601 - skipped (164 entries)

SEQ ID NO: 5602 - protein, 10 aa, synthetic construct
PLNGAVHLYA

SEQ ID NO: 5603 - protein, 10 aa, synthetic construct
AQARDSPKGW

SEQ ID NO: 5604 - protein, 10 aa, synthetic construct
LTNGAVRDRP

SEQ ID NO: 5605 - protein, 10 aa, synthetic construct
VQAFTHDSRG

SEQ ID NO: 5606 - protein, 10 aa, synthetic construct
AQAYSTDVRM

SEQ ID NO: 5607 - protein, 10 aa, synthetic construct
AQAYSTDVRI

SEQ ID NO: 5608 - protein, 10 aa, synthetic construct
AQAFTAAERM

SEQ ID NO: 5609 - protein, 10 aa, synthetic construct
AQTHLQIGVA

SEQ ID NO: 5610 - protein, 10 aa, synthetic construct
AQSNAVLSLA

SEQ ID NO: 5611 - protein, 10 aa, synthetic construct
AQAYSTDERM

SEQ ID NO: 5612 - protein, 10 aa, synthetic construct
AQAYSTDVRL

SEQ ID NO: 5613 - protein, 10 aa, synthetic construct
AQATVSTLRM

SEQ ID NO: 5614 - protein, 10 aa, synthetic construct
AQAYSTDERK

SEQ ID NO: 5615 - protein, 10 aa, synthetic construct
AQAYSTDMRM

SEQ ID NO: 5616 - protein, 10 aa, synthetic construct
VVNGAVLHVA

SEQ ID NO: 5617 - protein, 10 aa, synthetic construct
AQAYSTDVTM

SEQ ID NO: 5618 - protein, 10 aa, synthetic construct
AQAHLQIGVA

SEQ ID NO: 5619 - protein, 10 aa, synthetic construct
FLDPAVSSKA

SEQ ID NO: 5620 - protein, 10 aa, synthetic construct
AQAYVSTLRM

SEQ ID NO: 5621 - protein, 10 aa, synthetic construct
AQAQTGPPLK

SEQ ID NO: 5622 - protein, 10 aa, synthetic construct
EQASRLPTPG

SEQ ID NO: 5623 - protein, 10 aa, synthetic construct
AQASVSTMRM

SEQ ID NO: 5624 - protein, 10 aa, synthetic construct
TDYSAVRLGA

SEQ ID NO: 5625 - protein, 10 aa, synthetic construct
TQAYSTDVRM

SEQ ID NO: 5626 - protein, 10 aa, synthetic construct
AQALPSNERL

SEQ ID NO: 5627 - protein, 10 aa, synthetic construct
AQAYSTDVRT

SEQ ID NO: 5628 - protein, 10 aa, synthetic construct
AQSSLPEMVA

SEQ ID NO: 5629 - protein, 10 aa, synthetic construct
AQAGEQSTRL

SEQ ID NO: 5630 - protein, 10 aa, synthetic construct
AQASNDVGRA

SEQ ID NO: 5631 - protein, 10 aa, synthetic construct
AQATFTASEY

SEQ ID NO: 5632 - protein, 10 aa, synthetic construct
AKAHAGTIYS

SEQ ID NO: 5633 - protein, 10 aa, synthetic construct
AQARTIDQCC

SEQ ID NO: 5634 - protein, 10 aa, synthetic construct
AQEYNSNPKA

SEQ ID NO: 5635 - protein, 10 aa, synthetic construct
AQVVDNSTHA

SEQ ID NO: 5636 - protein, 10 aa, synthetic construct
AQATLSVPLK

SEQ ID NO: 5637 - protein, 10 aa, synthetic construct
AQIVMNSLKA

SEQ ID NO: 5638 - protein, 10 aa, synthetic construct
AQATMSQTMA

SEQ ID NO: 5639 - protein, 10 aa, synthetic construct
AQALTQDERW

SEQ ID NO: 5640 - protein, 10 aa, synthetic construct
AQAQLSTLRP

SEQ ID NO: 5641 - protein, 10 aa, synthetic construct
AQVVMGISVA

SEQ ID NO: 5642 - protein, 10 aa, synthetic construct
AQAYTTDVRM

SEQ ID NO: 5643 - protein, 10 aa, synthetic construct
AQHIDSMRPP

SEQ ID NO: 5644 - protein, 10 aa, synthetic construct
AQASTGTLRL

SEQ ID NO: 5645 - protein, 10 aa, synthetic construct
AQHRALDYYA

SEQ ID NO: 5646 - protein, 10 aa, synthetic construct
AQARESPRGL

SEQ ID NO: 5647 - protein, 10 aa, synthetic construct
AQALLAGTRV

SEQ ID NO: 5648 - protein, 10 aa, synthetic construct
TKIQAVPWNA

SEQ ID NO: 5649 - protein, 10 aa, synthetic construct
AQASLSSTRP

SEQ ID NO: 5650 - protein, 10 aa, synthetic construct
AQAMGSRSDQ

SEQ ID NO: 5651 - protein, 10 aa, synthetic construct
AQAAQGTYRG

SEQ ID NO: 5652 - protein, 10 aa, synthetic construct
SQENAVFSKA

SEQ ID NO: 5653 - protein, 10 aa, synthetic construct
AQAYGLPKGP

SEQ ID NO: 5654 - protein, 10 aa, synthetic construct
GGTLAVVSLA

SEQ ID NO: 5655 - protein, 10 aa, synthetic construct
AQAYVSSVKM

SEQ ID NO: 5656 - protein, 25 aa, synthetic construct
GGGGSGGGGSGGGGSGGGGSGGGGS
